(19) United States
(12) Patent Application Publication
(10) Pub. No.: US 2019/0017063 A1
(43) Pub. Date: Jan. 17, 2019

(54) PLANTS WITH MODIFIED TRAITS

(71) Applicant: COMMONWEALTH SCIENTIFIC AND INDUSTRIAL RESEARCH ORGANISATION, Acton (AU)

(72) Inventors: Madeline Claire MITCHELL, Lyneham (AU); Uday Kumar DIVI, Belconnen (AU); Thomas VANHERCKE, Kaleen (AU); James Robertson PETRIE, Goulburn (AU); Surinder Pal SINGH, Downer (AU); Allan Graham GREEN, Cremorne Point (AU)

(73) Assignee: Commonwealth Scientific and Industrial Research Organisation, Acton (AU)

(21) Appl. No.: 16/068,451

(22) PCT Filed: Jan. 6, 2017
(86) PCT No.: PCT/AU2017/050012

§ 371 Date: Jul. 6, 2018

(30) Foreign Application Priority Data
Jan. 7, 2016 (AU) 2016900039
Sep. 2, 2016 (AU) 2016903541
Sep. 6, 2016 (AU) 2016903577
Nov. 11, 2016 (AU) 2016904611

(51) Int. Cl. C12N 15/82; C10L 1/02; A23K 10/30

(52) U.S. Cl. CPC C12N 15/8247; C12N 15/8243; C10L 1/026; A23K 10/30; C10L 2290/42; C10L 2270/026; C10L 2290/26; C10L 2290/02; C10L 2290/04; C10L 2200/0476

(57) ABSTRACT

The present invention relates to transgenic plants, or parts thereof, with modified traits, as well as methods of selecting and using these plants or parts. In particular, the present invention relates to a transgenic plant, or part thereof, comprising a first exogenous polynucleotide which encodes a transcription factor polypeptide that increases the expression of one or more glycolytic and/or fatty acid biosynthetic genes in the plant or part thereof, and a second exogenous polynucleotide which encodes a polypeptide involved in the biosynthesis of one or more non-polar lipids. Furthermore, in addition to an increased triacylglycerol (TAG) content relative to a corresponding wild-type plant or part thereof, the plant or part thereof have a modified phenotype selected from; an increased soluble protein content, an increased nitrogen content, a decreased carbon:nitrogen ratio, increased photosynthetic gene expression, increased photosynthetic capacity, decreased total dietary fibre (TDF) content, increased carbon content and an increased energy content.

### FIELD OF THE INVENTION

[0001] The present invention relates to transgenic plants, or parts thereof, with modified traits, as well as methods of selecting and using these plants or parts. In particular, the present invention relates to a transgenic plant, or part thereof, comprising a first exogenous polynucleotide which encodes a transcription factor polypeptide that increases the expression of one or more glycolytic and/or fatty acid biosynthetic genes in the plant or part thereof, and a second exogenous polynucleotide which encodes a polypeptide involved in the biosynthesis of one or more non-polar lipids. Furthermore, in addition to an increased triacylglycerol (TAG) content relative to a corresponding wild-type plant or part thereof, the plant or part thereof have a modified phenotype selected from; an increased soluble protein content, an increased nitrogen content, a decreased carbon:nitrogen ratio, increased photosynthetic gene expression, increased photosynthetic capacity, decreased total dietary fibre (TDF) content, increased carbon content and an increased energy content.

### BACKGROUND OF THE INVENTION

[0002] Meeting consumer demands for livestock products, for example meat, milk and eggs is reliant on the availability of regular supplies of safe, cost-effective animal feeds, in particular feeds with high protein content, high nitrogen content and/or high energy content. As consumer demands for such livestock products increase, particularly in the developing world, for example, global demand for meat products is anticipated to increase 58% between 1995 and 2020 (FAO Animal Production and Health Proceedings, 2002), an increase in feed protein supply is required.

[0003] Protein sources in animal feeds include animal based sources and plant based protein sources. High levels of protein for animal feeds can be obtained from animal sources such as meat and bone meal. However, there are often safety concerns surrounding animal protein sources due to the risk of disease transmission e.g. bovine spongiform encephalopathy (mad cow disease), foodborne bacterial infections, veterinary drug residues and chemical contamination. Such risks are not associated with plant based protein sources.

[0004] Plant based protein sources include forage and silage. Forage is plant material comprising plant leaves and stems which is eaten by grazing livestock. Forage often includes grasses, legumes, tree legumes and crop residues such as sorghum, corn and soybean. Silage is fermented plant material used to produce a high-moisture stored fodder suitable for feeding livestock. Silage often includes alfalfa, maize, clover, vetches, oats and lye. Traditional protein sources in animal feeds include oil meal crops such as soybean, oilseed rape, niger, jojoba, oil palm, coconut, sunflower, sesame, crambe or cotton (seed and legumes) and legumes such as peas, beans and lupin, chickpea, cowpea and mungbean. These plants have high protein concentration compared to cereals. For example soybean has a high crude protein content ˜44 to 50% compared to: rice which has a low crude protein crude protein content ˜7%; maize, barley and sorghum which have a low crude protein content ˜9 to 10%; and wheat, oats and triticale which have a crude protein content of ˜12% (FAO Animal Production and Health Proceedings, 2002).

[0005] Plants derived proteins have many uses, such as animal feeds, as purified sources of amino acids for animal feeds and commercial applications (e.g. pharmaceutical, cosmetic production or nutritional supplements), biofuel or the production of food products, additives or supplements suitable for human consumption.

[0006] To maximise yields for the commercial biological production of plant protein, there is a need for further means to increase protein levels in traditional and non-traditional plants used for commercial biological production of plant protein.

[0007] In particular, to maximise yields for the commercial biological production of plant protein suitable for use in animal feeds, there is a need for further means to increase protein level, nitrogen level and/or energy levels in traditional and non-traditional plants used for commercial biological production of plant protein suitable for use in animal feeds.

### SUMMARY OF THE INVENTION

[0008] The present inventors have demonstrated significant modifications in traits of transgenic plants, or parts thereof such as vegetative parts, by manipulation of lipid pathways.

[0009] Thus, in a first aspect, the present invention provides a transgenic plant, or part thereof, comprising

[0010] a) a first exogenous polynucleotide which encodes a transcription factor polypeptide that increases the expression of one or more glycolytic and/or fatty acid biosynthetic genes in the plant or part thereof,

[0011] b) a second exogenous polynucleotide which encodes a polypeptide involved in the biosynthesis of one or more non-polar lipids,

[0012] c) an increased triacylglycerol (TAG) content in the part or at least a part of the transgenic plant relative to a corresponding wild-type plant or part thereof, and one or more or all of the following phenotypes;

[0013] d) an increased soluble protein content in the part or at least a part of the transgenic plant relative to a corresponding wild-type plant or part thereof,

[0014] e) an increased nitrogen content in the part or at least a part of the transgenic plant relative to a corresponding wild-type plant or part thereof,

[0015] f) decreased carbon:nitrogen ratio in the part or at least a part of the transgenic plant relative to a corresponding wild-type plant or part thereof,

[0016] g) increased photosynthetic gene expression in the part or at least a part of the transgenic plant relative to a corresponding wild-type plant or part thereof,

[0017] h) increased photosynthetic capacity in the part or at least a part of the transgenic plant relative to a corresponding wild-type plant or part thereof,

[0018] i) decreased total dietary fibre (TDF) content in the part or at least a part of the transgenic plant relative to a corresponding wild-type plant or part thereof,

[0019] j) increased carbon content in the part or at least a part of the transgenic plant relative to a corresponding wild-type plant or part thereof, and

[0020] k) increased energy content in the part or at least a part of the transgenic plant relative to a corresponding wild-type plant or part thereof, wherein each exogenous polynucleotide is operably linked to a promoter which is capable of directing expression of the polynucleotide in the plant, or part thereof.

[0021] In an embodiment, the transgenic plant, or part thereof, preferably a Sorghum sp. or Zea mays plant or part thereof, further comprises

[0022] l) an increased TTQ relative to a corresponding wild-type plant or part thereof, wherein each exogenous polynucleotide is operably linked to a promoter which is capable of directing expression of the polynucleotide in the plant, or part thereof. In an embodiment, the plant or part thereof is derived from an ancestor transgenic plant which comprises the first and second exogenous polynucleotides, wherein the ancestor transgenic plant was selected from a plurality of candidate transgenic plants each comprising the first and second exogenous polynucleotides on the basis that the ancestor transgenic plant comprised one or more or all of the following phenotypes;

[0023] a) an increased soluble protein content in at least a part of the transgenic plant relative to a corresponding wild-type plant or part thereof,

[0024] b) an increased nitrogen content in at least a part of the transgenic plant relative to a corresponding wild-type plant or part thereof,

[0025] c) decreased carbon:nitrogen ratio in at least a part of the transgenic plant relative to a corresponding wild-type plant or part thereof,

[0026] d) increased photosynthetic gene expression in at least a part of the transgenic plant relative to a corresponding wild-type plant or part thereof,

[0027] e) increased photosynthetic capacity in at least a part of the transgenic plant relative to a corresponding wild-type plant or part thereof,

[0028] f) decreased total dietary fibre (TDF) content in at least a part of the transgenic plant relative to a corresponding wild-type plant or part thereof,

[0029] g) increased carbon content in at least a part of the transgenic plant relative to a corresponding wild-type plant or part thereof, and

[0030] h) increased energy content in at least a part of the transgenic plant relative to a corresponding wild-type plant or part thereof.

[0031] In a second aspect, the present invention provides a transgenic plant, or part thereof, comprising

[0032] a) a first exogenous polynucleotide which encodes a transcription factor polypeptide that increases the expression of one or more glycolytic and/or fatty acid biosynthetic genes in the plant or a part thereof,

[0033] b) a second exogenous polynucleotide which encodes a polypeptide involved in the biosynthesis of one or more non-polar lipids,

[0034] c) an increased triacylglycerol (TAG) content in the part or at least a part of the transgenic plant relative to a corresponding wild-type plant or part thereof,

wherein each exogenous polynucleotide is operably linked to a promoter which is capable of directing expression of the polynucleotide in the plant, or part thereof, and wherein the transgenic plant is derived from an ancestor transgenic plant which comprises the first and second exogenous polynucleotides, wherein the ancestor transgenic plant was selected from a plurality of candidate transgenic plants each comprising the first and second exogenous polynucleotides on the basis that the ancestor transgenic plant comprised one or more or all of the following phenotypes;

[0035] i) an increased soluble protein content in at least a part of the transgenic plant relative to a corresponding wild-type plant or part thereof,

[0036] ii) an increased nitrogen content in at least a part of the transgenic plant relative to a corresponding wild-type plant or part thereof,

[0037] iii) decreased carbon:nitrogen ratio in at least a part of the transgenic plant relative to a corresponding wild-type plant or part thereof,

[0038] iv) increased photosynthetic gene expression in at least a part of the transgenic plant relative to a corresponding wild-type plant or part thereof,

[0039] v) increased photosynthetic capacity in at least a part of the transgenic plant relative to a corresponding wild-type plant or part thereof,

[0040] vi) decreased total dietary fibre (TDF) content in at least a part of the transgenic plant relative to a corresponding wild-type plant or part thereof,

[0041] vii) increased carbon content in at least a part of the transgenic plant relative to a corresponding wild-type plant or part thereof, and
[0042] viii) increased energy content in at least a part of the transgenic plant relative to a corresponding wild-type plant or part thereof.

[0043] In an embodiment of the above aspect, the ancestor transgenic plant further comprised an increased TTQ and/or increased TAG content relative to a corresponding wild-type plant or part thereof.

[0044] In an embodiment of the first and second aspects, the plant or part thereof has one or more or all of;

[0045] i) an increased soluble protein content in at least a part of the transgenic plant relative to a corresponding wild-type plant or part thereof,

[0046] ii) an increased nitrogen content in at least a part of the transgenic plant relative to a corresponding wild-type plant or part thereof,

[0047] iii) decreased carbon:nitrogen ratio in at least a part of the transgenic plant relative to a corresponding wild-type plant or part thereof.

[0048] In an embodiment, the plant or part thereof has one or more or all of;

[0049] i) the plant or part thereof has an increased soluble protein content in the part or at least a part of the transgenic plant relative to the corresponding wild-type plant or part thereof of at least about 10%, at least about 25%, at least about 50%, at least about 75%, at least about 100%, between about 10% and about 200%, between about 50% and about 150%, or between about 50% and about 125%,

[0050] ii) the plant or part thereof has an increased nitrogen content in the part or at least a part of the transgenic plant relative to the corresponding wild-type plant or part thereof of at least about 10%, at least about 25%, at least about 50%, at least about 75%, at least about 100%, between about 10% and about 200%, between about 50% and about 150% or between about 50% and about 125%,

[0051] iii) the part is a leaf which has an increased soluble protein content relative to a corresponding wild-type leaf of at least about 10%, at least about 25%, at least about 50%, at least about 75%, at least about 100%, between about 10% and about 200%, between about 50% and about 150%, or between about 50% and about 125%,

[0052] iv) the part is a leaf which has an increased nitrogen content relative to a corresponding wild-type leaf of at least about 10%, at least about 25%, at least about 50%, at least about 75%, at least about 100%, between about 10% and about 200%, between about 50% and about 150%, or between about 50% and about 125%,

[0053] v) the plant or part thereof has a decreased carbon:nitrogen content in the part or at least a part of the transgenic plant relative to the corresponding wild-type plant or part thereof of at least about 10%, at least about 25%, at least about 40%, between about 10% and about 50%, or between about 25% and about 50%,

[0054] vi) expression of one or more genes involved in photosynthesis is increased in the plant or part thereof relative to the corresponding wild-type plant or part thereof,

[0055] vii) the plant or part thereof has an increased carbon content in the part or at least a part of the transgenic plant relative to the corresponding wild-type plant or part thereof of at least about 10%, at least about 25%, at least about 50%, at least about 75%, at least about 100%, at least about 125%, at least about 150%, between about 10% and about 300%, between about 50% and about 250%, or between about 100% and about 200%,

[0056] viii) the plant or part thereof has an increased energy content in the part or at least a part of the transgenic plant relative to the corresponding wild-type plant or part thereof of at least about 10%, at least about 25%, at least about 50%, at least about 75%, at least about 100%, at least about 125%, at least about 150%, at least about 200%, at least about 250%, between about 10% and about 400%, between about 50% and about 300%, or between about 200% and about 300%,

[0057] ix) the plant or part thereof has an decreased starch content in the part or at least a part of the transgenic plant relative to the corresponding wild-type plant or part thereof of at least about 2 fold, at least about 5 fold, at least about 10 fold, at least about 15 fold, at least about 20 fold, at least about 25 fold, between about 5 fold and about 35 fold, between about 10 fold and about 30 fold, or between about 20 fold and about 30 fold,

[0058] x) the plant or part thereof has an decreased TDF content in the part or at least a part of the transgenic plant relative to the corresponding wild-type plant or part thereof of at least about 10%, at least about 30%, at least about 50%, between about 10% and about 70%, or between about 30% and about 65%, and

[0059] xi) the plant or part thereof has a soluble sugar content in the part or at least a part of the transgenic plant relative to the corresponding wild-type plant or part thereof which is about 0.5 fold to 2 fold.

[0060] In another embodiment, the plant or part thereof further comprises one or more or all of;

[0061] a) a first genetic modification which down-regulates endogenous production and/or activity of a polypeptide involved in the catabolism of triacylglycerols (TAG) in the plant, or part thereof, when compared to a corresponding plant, or part thereof, lacking the genetic modification,

[0062] b) a third exogenous polynucleotide which encodes a polypeptide which increases the export of fatty acids out of plastids of the plant when compared to a corresponding plant lacking the third exogenous polynucleotide,

[0063] c) a fourth exogenous polynucleotide which encodes a second transcription factor polypeptide that increases the expression of one or more glycolytic and/or fatty acid biosynthetic genes in the plant, or part thereof,

[0064] d) a fifth exogenous polynucleotide which encodes an oil body coating (OBC) polypeptide,

[0065] e) a second genetic modification which down-regulates endogenous production and/or activity of a polypeptide involved in importing fatty acids into plastids of the plant when compared to a corresponding plant lacking the second genetic modification, and

[0066] f) a third genetic modification which down-regulates endogenous production and/or activity of a polypeptide involved in diacylglycerol (DAG) production in the plastid when compared to a corresponding plant lacking the third genetic modification, wherein each exogenous polynucleotide is operably linked to a promoter which is capable of directing expression of the polynucleotide in the plant, or part thereof.

[0067] In a preferred embodiment, the presence of the first genetic modification, the third exogenous polynucleotide or the fourth exogenous polynucleotide, together with the first and second exogenous polynucleotides increases the total non-polar lipid content of the plant or part thereof, preferably a vegetative plant part such as a leaf or stem, relative to a corresponding plant or part thereof which comprises the first and second exogenous polynucleotides but lacking each of first genetic modification, the third exogenous polynucleotide and the fourth exogenous polynucleotide. More preferably, the increase is synergistic. Most preferably, at least the promoter that directs expression of the first exogenous polynucleotide is a promoter other than a constitutive promoter. Alternatively for Sorghum or Zea mays, the promoter is preferably a constitutive promoter such as, for example a ubiquitin gene promoter.

[0068] In an embodiment, the addition of one or more of the exogenous polynucleotides or genetic modifications, preferably the exogenous polynucleotide encoding an OBC or a fatty acyl thioesterase or the genetic modification which down-regulates endogenous production and/or activity of a polypeptide involved in the catabolism of triacylglycerols (TAG) in the plant or part thereof, more preferably the exogenous polynucleotide which encodes a FATA thioesterase or an LDAP or which decreases expression of an endogenous TAG lipase such as a SDP1 TAG lipase in the plant or part thereof, results in a synergistic increase in the total non-polar lipid content of the plant or part thereof when added to the pair of transgenes WRI1 and DGAT, particularly before the plant flowers and even more particularly in the stems and/or roots of the plant. For example, see Examples 8, 11 and 15. In a preferred embodiment, the increase in the TAG content of a stem or root of the plant is at least 2-fold, more preferably at least 3-fold, relative to a corresponding plant or part thereof transformed with genes encoding WRI1 and DGAT1 but lacking the FATA thioesterase, LDAP and the genetic modification which down-regulates endogenous production and/or activity of a polypeptide involved in the catabolism of triacylglycerols (TAG) in the plant or part thereof. Most preferably, at least the promoter that directs expression of the first exogenous polynucleotide is a promoter other than a constitutive promoter. Alternatively for Sorghum or Zea mays, the promoter is preferably a constitutive promoter such as, for example a ubiquitin gene promoter.

[0069] In an embodiment, each genetic modification is, independently, a mutation of an endogenous gene which partially or completely inactivates the gene, such as a point mutation, an insertion, or a deletion, or an exogenous polynucleotide encoding an RNA molecule which inhibits expression of the endogenous gene, wherein the exogenous polynucleotide is operably linked to a promoter which is capable of directing expression of the polynucleotide in the plant, or part thereof. The point mutation may be a premature stop codon, a splice-site mutation, a frame-shift mutation or an amino acid substitution mutation that reduces activity of the gene or the encoded polypeptide. The deletion may be of one or more nucleotides within a transcribed exon or promoter of the gene, or extend across or into more than one exon, or extend to deletion of the entire gene. Preferably the deletion is introduced by use of ZF, TALEN or CRISPR technologies. In an alternate embodiment, one or more or all of the genetic modifications is an exogenous polynucleotide encoding an RNA molecule which inhibits expression of the endogenous gene, wherein the exogenous polynucleotide is operably linked to a promoter which is capable of directing expression of the polynucleotide in the plant, or part thereof. Examples of exogenous polynucleotide which reduces expression of an endogenous gene are selected from the group consisting of an antisense polynucleotide, a sense polynucleotide, a microRNA, a polynucleotide which encodes a polypeptide which binds the endogenous enzyme, a double stranded RNA molecule and a processed RNA molecule derived therefrom. In an embodiment, the plant or part thereof comprises genetic modifications which are an introduced mutation in an endogenous gene and an exogenous polynucleotide encoding an RNA molecule which reduces expression of another endogenous gene. In an alternate embodiment, all of the genetic modifications that provide for the increased TTQ and or TAG levels are mutations of endogenous genes.

[0070] In an embodiment, the plant or part thereof has one or more or all of;

[0071] i) the transcription factor polypeptide is selected from the group consisting of Wrinkled 1 (WRI1), Leafy Cotyledon 1 (LEC1), LEC1-like, Leafy Cotyledon 2 (LEC2), BABY BOOM (BBM), FUS3, ABI3, ABI4, ABI5, Dof4 and Dof11, or the group consisting of MYB73, bZIP53, AGL15, MYB115, MYB118, TANMEI, WUS, GFR2a1, GFR2a2 and PHR1,

[0072] ii) the polypeptide involved in the biosynthesis of one or more non-polar lipids is a fatty acyl acyltransferase is involved in the biosynthesis of TAG, DAG or monoacylglycerol (MAG) in the plant or part thereof, such as a DGAT, PDAT, LPAAT, GPAT or MGAT, preferably a DGAT or a PDAT, or a PDCT or a CPT polypeptide,

[0073] iii) the polypeptide involved in the catabolism of triacylglycerols (TAG) in the plant, or part thereof, is an SDP1 lipase, a Cgi58 polypeptide, an acyl-CoA oxidase such as ACX1 or ACX2, or a polypeptide involved in β-oxidation of fatty acids in the plant or part thereof such as a PXA1 peroxisomal ATP-binding cassette transporter, preferably an SDP1 lipase,

[0074] iv) the oil body coating (OBC) polypeptide is oleosin, such as a polyoleosin or a caleosin, or a lipid droplet associated protein (LDAP),

[0075] v) the polypeptide which increases the export of fatty acids out of plastids of the plant or part thereof is a C16 or C18 fatty acid thioesterase such as a FATA polypeptide or a FATB polypeptide, a fatty acid transporter such as an ABCA9 polypeptide or a long-chain acyl-CoA synthetase (LACS),

[0076] vi) the polypeptide involved in importing fatty acids into plastids of the plant or part thereof is a fatty acid transporter, or subunit thereof, preferably a TGD polypeptide, and

[0077] vii) the polypeptide involved in diacylglycerol (DAG) production in the plastid is a plastidial GPAT, a plastidial LPAAT or a plastidial PAP.

[0078] In an embodiment, the activity of PDCT or CPT in the cell or vegetative plant part is increased relative to a wild-type cell or vegetative plant part. Alternatively, the activity of PDCT or CPT is decreased, for example by mutation in the endogenous gene encoding the enzyme or by downregulation of the gene through an RNA molecule which reduces its expression.

[0079] In an embodiment, the polypeptide involved in the biosynthesis of one or more non-polar lipids is a DGAT or a PDAT and the polypeptide involved in the catabolism of TAG in the plant or part thereof is an SDP1 lipase.

[0080] In an embodiment, the transcription factor polypeptide that increases the expression of one or more glycolytic and/or fatty acid biosynthetic genes in the plant or part thereof is a WRI1 polypeptide and the polypeptide involved in the biosynthesis of one or more non-polar lipids is a DGAT or a PDAT.

[0081] In an embodiment, the transcription factor polypeptide that increases the expression of one or more glycolytic and/or fatty acid biosynthetic genes in the plant or part thereof is a WRI1 polypeptide, a LEC2 polypeptide, a LEC1 polypeptide or a LEC1-like polypeptide and the polypeptide involved in the biosynthesis of one or more non-polar lipids is a DGAT.

[0082] In an embodiment, the transcription factor polypeptide that increases the expression of one or more glycolytic and/or fatty acid biosynthetic genes in the plant or part thereof is a WRI1 polypeptide, a LEC2 polypeptide, a LEC1 polypeptide or a LEC1-like polypeptide and the polypeptide involved in the catabolism of triacylglycerols (TAG) in the plant or part thereof is an SDP1 lipase.

[0083] In an embodiment, the transcription factor polypeptide that increases the expression of one or more glycolytic and/or fatty acid biosynthetic genes in the plant or part thereof is a WRI1 polypeptide, a LEC2 polypeptide, a LEC1 polypeptide or a LEC1-like polypeptide, the polypeptide involved in the biosynthesis of one or more non-polar lipids is a DGAT or a PDAT and the polypeptide involved in the catabolism of triacylglycerols (TAG) in the plant or part thereof is an SDP1 lipase.

[0084] In an embodiment, the transcription factor polypeptide that increases the expression of one or more glycolytic and/or fatty acid biosynthetic genes in the plant is a WRI1 polypeptide, a LEC2 polypeptide, a LEC1 polypeptide or a LEC1-like polypeptide, and the polypeptide involved in importing fatty acids into plastids of the plant or part thereof is a TGD polypeptide.

[0085] In an embodiment, the transcription factor polypeptide that increases the expression of one or more glycolytic and/or fatty acid biosynthetic genes in the plant is a WRI1 polypeptide, a LEC2 polypeptide, a LEC1 polypeptide or a LEC1-like polypeptide, and the polypeptide involved in diacylglycerol (DAG) production is a plastidial GPAT.

[0086] In an embodiment, the transcription factor polypeptide that increases the expression of one or more glycolytic and/or fatty acid biosynthetic genes in the plant is a WRI1 polypeptide, a LEC2 polypeptide, a LEC1 polypeptide or a LEC1-like polypeptide, the polypeptide which increases the export of fatty acids out of plastids of the plant is a fatty acid thioesterase, preferably a FATA or a FATB polypeptide, and the polypeptide involved in importing fatty acids into plastids of the plant is a TGD polypeptide.

[0087] In an embodiment, the transcription factor polypeptide that increases the expression of one or more glycolytic and/or fatty acid biosynthetic genes in the plant is a WRI1 polypeptide, a LEC2 polypeptide, a LEC1 polypeptide or a LEC1-like polypeptide, the polypeptide which increases the export of fatty acids out of plastids of the plant is a fatty acid thioesterase, preferably a FATA or a FATB polypeptide, and the polypeptide involved in diacylglycerol (DAG) production is a plastidial GPAT.

[0088] In an embodiment, the transcription factor polypeptide that increases the expression of one or more glycolytic and/or fatty acid biosynthetic genes in the plant is a WRI1 polypeptide, a LEC2 polypeptide, a LEC1 polypeptide or a LEC1-like polypeptide, the polypeptide involved in importing fatty acids into plastids of the plant a TGD polypeptide, and the polypeptide involved in diacylglycerol (DAG) production is a plastidial GPAT.

[0089] In an embodiment, when present, the two transcription factors are WRI1 and LEC2, or WRI1 and LEC1.

[0090] In the above embodiments, the plant or part thereof preferably comprises an exogenous polynucleotide which encodes a DGAT and a genetic modification which down-regulates production of an endogenous SDP1 lipase. More preferably, the plant or part thereof does not comprise an exogenous polynucleotide encoding a PDAT, and/or is a plant or part thereof other than a Nicotiana benthamiana or part thereof, and/or the WRI1 is a WRI1 other than Arabidopsis thaliana WRI1 (SEQ ID NOs:21 or 22) and/or is a plant or part thereof other than a Brassica napus or part thereof. In an embodiment, at least one of the exogenous polynucleotides in the plant or part thereof is expressed from a promoter which is not a constitutive promoter such as, for example, a promoter which is expressed preferentially in green tissues or stems of the plant or that is up-regulated after commencement of flowering or during senescence.

[0091] In an embodiment, the exogenous polynucleotide encoding WRI1 comprises one or more of the following:

[0092] i) nucleotides encoding a polypeptide comprising amino acids whose sequence is set forth as any one of SEQ ID NOs:21 to 75 or 196 to 201, or a biologically active fragment thereof, or a polypeptide whose amino acid sequence is at least 30% identical to any one or more of SEQ ID NOs: 21 to 75 or 196 to 201,

[0093] ii) nucleotides whose sequence is at least 30% identical to i), and

[0094] iii) nucleotides which hybridize to i) and/or ii) under stringent conditions. Preferably, the WRI1 polypeptide is a WRI1 polypeptide other than Arabidopsis thaliana WRI1 (SEQ ID NOs:21 or 22). More preferably, the WRI1 polypeptide comprises amino acids whose sequence is set forth as SEQ ID NO:199, or a biologically active fragment thereof, or a polypeptide whose amino acid sequence is at least 30% identical thereto.

[0095] In an embodiment, the part is a vegetative part and one or more or all of the promoters are expressed at a higher level in the vegetative part relative to seed of the plant.

[0096] In a further embodiment, the plant or part thereof has one or more or all of;

[0097] i) the plant, or a part thereof, comprises a total non-polar lipid content of at least about 8%, at least about 10%, at least about 11%, at least about 12%, at least about 15%, at least about 20%, at least about 25%, at least about 30%, at least about 35%, at least about 40%, at least about 45%, at least about 50%, at least about 55%, at least about 60%, at least about 65%, at least about 70%, between 8% and 75%, between 10% and 75%, between 11% and 75%, between about 15% and 75%, between about 20% and 75%, between about 30% and 75%, between about 40% and 75%, between about 50% and 75%, between about 60% and 75%, or between about 25% and 50% (w/w dry weight), preferably before flowering,

[0098] ii) a vegetative part of a plant comprises a TAG content of at least about 8%, at least about 10%, at least about 11%, at least about 12%, at least about 15%, at least about 20%, at least about 25%, at least about 30%, at least about 35%, at least about 40%, at least about 45%, at least about 50%, at least about 55%, at least about 60%, at least about 65%, at least about 70%, between 8% and 75%, between 10% and 75%, between 11% and 75%, between about 15% and 75%, between about 20% and 75%, between about 30% and 75%, between about 40% and 75%, between about 50% and 75%, between about 60% and 75%, or between about 25% and 50% (w/w dry weight), preferably before flowering,

[0099] iii) one or more or all of the promoters are selected from a tissue-specific promoter such as a leaf and/or stem specific promoter, a developmentally regulated promoter such as a senescence-specific promoter such as a SAG12 promoter, an inducible promoter, or a circadian-rhythm regulated promoter,

[0100] iv) the plant, or part thereof; is one member of a population or collection of at least about 1,500, at least about 3,000 or at least about 5,000 such plants, or parts thereof, preferably vegetative plant parts, wherein the first and second exogenous polynucleotides are inserted at the same chromosomal location in the genome of each of the plants,

[0101] v) the plant is a member of the family Fabaceae (or Leguminosae) such as alfalfa, clover, peas, lucerne, beans, lentils, lupins, mesquite, carob, soybeans, and peanuts, or a member of the family Poaceae such as corn or sorghum, and

[0102] vi) the part is a leaf or leaves which are mature.

[0103] In an embodiment, before the plant flowers, a vegetative part of the plant comprises a total non-polar lipid content of at least about 8%, at least about 10%, about 11%, between 8% and 15%, or between 9% and 12% (w/w dry weight).

[0104] In a further embodiment, the plant or part thereof is;

[0105] i) a 16:3 plant or a vegetative part or seed thereof, and which comprises one or more or all of the following:
[0106] a) an exogenous polynucleotide which encodes a polypeptide which increases the export of fatty acids out of plastids of the plant when compared to a corresponding plant lacking the exogenous polynucleotide,
[0107] b) a first genetic modification which down-regulates endogenous production and/or activity of a polypeptide involved in importing fatty acids into plastids of the plant when compared to a corresponding plant lacking the first genetic modification, and
[0108] c) a second genetic modification which down-regulates endogenous production and/or activity of a polypeptide involved in diacylglycerol (DAG) production in the plastid when compared to a corresponding plant lacking the second genetic modification,
   wherein the exogenous polynucleotide is operably linked to a promoter which is capable of directing expression of the polynucleotide in the plant, or part thereof, or

[0109] ii) a 18:3 plant or a vegetative part or seed thereof.

[0110] In an embodiment, the plant or part thereof has one or more or all of;

[0111] i) the plant comprises a part, preferably a vegetative part, which has an increased synthesis of total fatty acids relative to a corresponding part lacking the first exogenous polynucleotide, or a decreased catabolism of total fatty acids relative to a corresponding part lacking the first exogenous polynucleotide, or both, such that it has an increased level of total fatty acids relative to a corresponding part lacking the first exogenous polynucleotide,

[0112] ii) the plant comprises a part, preferably a vegetative part, which has an increased expression and/or activity of a fatty acyl acyltransferase which catalyses the synthesis of TAG, DAG or MAG, preferably TAG, relative to a corresponding part having the first exogenous polynucleotide and lacking the exogenous polynucleotide which encodes a polypeptide involved in the biosynthesis of one or more non-polar lipids,

[0113] iii) the plant comprises a part, preferably a vegetative part, which has a decreased production of lysophosphatidic acid (LPA) from acyl-ACP and G3P in its plastids relative to a corresponding part having the first exogenous polynucleotide and lacking the genetic modification which down-regulates endogenous production and/or activity of a polypeptide involved in diacylglycerol (DAG) production in plastids in the plant part,

[0114] iv) the plant comprises a part, preferably a vegetative part, which has an altered ratio of C16:3 to C18:3 fatty acids in its total fatty acid content and/or its galactolipid content relative to a corresponding part lacking the exogenous polynucleotide(s) and/or genetic modification(s), preferably a decreased ratio,

[0115] v) oleic acid comprises at least 20% (mol %), at least 22% (mol %), at least 30% (mol %), at least 40% (mol %), at least 50% (mol %), or at least 60% (mol %), preferably about 65% (mol %) or between 20% and about 65% of the total fatty acid content in the plant, or part thereof,

[0116] vi) non-polar lipid in the plant, or part thereof preferably a vegetative part, comprises an increased level of one or more fatty acids which comprise a hydroxyl group, an epoxy group, a cyclopropane group, a double carbon-carbon bond, a triple carbon-carbon bond, conjugated double bonds, a branched chain such as a methylated or hydroxylated branched chain, or a combination of two or more thereof, or any of two, three, four, five or six of the aforementioned groups, bonds or branched chains,

[0117] vii) non-polar lipid in the plant, or part thereof preferably a vegetative part, comprises one or more polyunsaturated fatty acids selected from eicosadienoic acid (EDA), arachidonic acid (ARA), stearidonic acid (SDA), eicosatrienoic acid (ETE), eicosatetraenoic acid (ETA), eicosapentaenoic acid (EPA), docosapentaenoic acid (DPA), docosahexaenoic acid (DHA), or a combination of two of more thereof,

[0118] viii) the part is a vegetative plant part, such as a leaf or a stem, or part thereof,

[0119] ix) one or more or all of the promoters are selected from promoter other than a constitutive promoter, preferably a tissue-specific promoter such as a leaf and/or stem specific promoter, a developmentally regulated promoter such as a senescense-specific promoter such as a SAG12 promoter, an inducible promoter, or a circadian-rhythm regulated promoter, preferably wherein at least one of the promoters operably linked to an exogenous polynucleotide which encodes a transcription factor polypeptide is a promoter other than a constitutive promoter,

[0120] x) the plant, or part thereof preferably a vegetative part, comprises a total fatty acid content whose oleic acid level and/or palmitic acid level is increased by at least 2% relative to a corresponding plant, or part thereof, lacking the exogenous polynucleotide(s) and/or genetic modification(s), and/or whose α-linolenic acid (ALA) level and/or linoleic acid level is decreased by at least 2% relative to a corresponding plant, or part thereof, lacking the exogenous polynucleotide(s) and/or genetic modification(s),

[0121] xi) non-polar lipid in the plant, or part thereof preferably a vegetative part, comprises a modified level of total sterols, preferably free (non-esterified) sterols, steroyl esters, steroyl glycosides, relative to the non-polar lipid in a corresponding plant, or part thereof, lacking the exogenous polynucleotide(s) and/or genetic modification(s),

[0122] xii) non-polar lipid in the plant, or part thereof, comprises waxes and/or wax esters,

[0123] xiii) the plant comprises an exogenous polynucleotide encoding a silencing suppressor, wherein the exogenous polynucleotide is operably linked to a promoter which is capable of directing expression of the polynucleotide in the plant,

[0124] xiv) the level of one or more non-polar lipid(s) and/or the total non-polar lipid content of the plant or part thereof, preferably a vegetative plant part, is at least 2% greater on a weight basis than in a corresponding plant or part, respectively, which comprises exogenous polynucleotides encoding an Arabidposis thaliana WRI1 (SEQ ID NO:21) and an Arabidopsis thaliana DGAT1 (SEQ ID NO:1),

[0125] xv) a total polyunsaturated fatty acid (PUFA) content which is decreased relative to the total PUFA content of a corresponding plant lacking the exogenous polynucleotide(s) and/or genetic modification(s),

[0126] xvi) the plant part is a potato (Solanum tuberosum) tuber, a sugarbeet (Beta vulgaris) beet, a sugarcane (Saccharum sp.) or sorghum (Sorghum bicolor) stem, a monocotyledonous plant seed having an increased total fatty acid content in its endosperm such as, for example, a wheat (Triticum aestivum) grain or a corn (Zea mays) kernel, a Nicotiana spp. leaf, or a legume seed having an increased total fatty acid content such as, for example, a Brassica sp. seed or a soybean (Glycine max) seed,

[0127] xvii) if the plant part is a seed, the seed germinates at a rate substantially the same as for a corresponding wild-type seed or when sown in soil produces a plant whose seed germinate at a rate substantially the same as for corresponding wild-type seed, and

[0128] xviii) the plant is an algal plant such as from diatoms (bacillariophytes), green algae (chlorophytes), blue-green algae (cyanophytes), golden-brown algae (chrysophytes), haptophytes, brown algae or heterokont algae.

[0129] In an embodiment, the plant or part thereof, comprises a first exogenous polynucleotide encoding a WRI1, a second exogenous polynucleotide encoding a DGAT or a PDAT, preferably a DGAT1, a third exogenous polynucleotide encoding an RNA which reduces expression of a gene encoding an SDP1 polypeptide, and a fourth exogenous polynucleotide encoding an oleosin. In preferred embodiments, the plant or part thereof has one or more or all of the following features:

[0130] i) a total lipid content of at least 8%, at least 10%, at least 12%, at least 14%, or at least 15.5% (% weight),

[0131] ii) at least a 3 fold, at least a 5 fold, at least a 7 fold, at least an 8 fold, or least a 10 fold, at higher total lipid content in the the plant or part thereof relative to a corresponding the plant or part thereof lacking the exogenous polynucleotides and genetic modifications,

[0132] iii) a total TAG content of at least 5%, at least 6%, at least 6.5% or at least 7% (% weight of dry weight or seed weight),

[0133] iv) at least a 40 fold, at least a 50 fold, at least a 60 fold, or at least 70 fold, at least 100 fold, or at least a 120-fold higher total TAG content relative to a corresponding the plant or part thereof lacking the exogenous polynucleotides and genetic modifications,

[0134] v) oleic acid comprises at least 15%, at least 19% or at least 22% (% weight of dry weight or seed weight) of the fatty acids in TAG,

[0135] vi) at least a 10 fold, at least a 15 fold or at least a 17 fold higher level of oleic acid in TAG relative to a corresponding the plant or part thereof lacking the exogenous polynucleotides and genetic modifications,

[0136] vii) palmitic acid comprises at least 20%, at least 25%, at least 30% or at least 33% (% weight) of the fatty acids in TAG,

[0137] viii) at least a 1.5 fold higher level of palmitic acid in TAG relative to a corresponding the plant or part thereof lacking the exogenous polynucleotides and genetic modifications,

[0138] ix) linoleic acid comprises at least 22%, at least 25%, at least 30% or at least 34% (% weight) of the fatty acids in TAG,

[0139] x) α-linolenic acid comprises less than 20%, less than 15%, less than 11% or less than 8% (% weight) of the fatty acids in TAG,

[0140] xi) at least a 5 fold, or at least an 8 fold, lower level of α-linolenic acid in TAG relative to a corresponding the plant or part thereof lacking the exogenous polynucleotides and genetic modifications, and

[0141] xii) when the part is a potato tuber, a TAG content of at least 0.5% on a dry weight basis and/or a total fatty acid content of at least 1%, preferably at least 1.5% or at least 2.0%, on a dry weight basis.

[0142] In the above embodiments, a preferred plant part is a leaf piece having a surface area of at least 1 cm² or a stem piece having a length of at least 1 cm.

[0143] In an embodiment of the above aspects, the plant or plant part has been treated so it is no longer able to be propagated or give rise to a living plant, i.e. it is dead (for example a brown leaf or stem). For example, the plant or plant part has been dried and/or ground. In another embodiment, the plant part is alive (for example, a green leaf or stem).

[0144] In an embodiment, the part is a seed, fruit, or a vegetative part such as an aerial plant part or a green part such as a leaf or stem.

[0145] In the above embodiments, it is preferred that the part is a vegetative part which is growing in soil or which was grown in soil and the plant part was subsequently harvested, and wherein the vegetative part comprises at least 8% TAG on a weight basis (% dry weight) such as for example between 8% and 75% or between 8% and 30%. More preferably, the TAG content is at least 10%, such as for example between 10% and 75% or between 10% and 30%. Preferably, these TAG levels are present in the vegetative parts prior to or at flowering of the plant or prior to seed setting stage of plant development. In these embodiments, it is preferred that the ratio of the TAG content in the leaves to the TAG content in the stems of the plant is between 1:1 and 10:1, and/or the ratio is increased relative to a corresponding vegetative part comprising the first and second exogenous polynucleotides and lacking the first genetic modification. Preferably, the vegetative plant part has an increased soluble protein content relative to the corresponding wild-type vegetative part of at least about 100%, or between about 50% and about 125%. Preferably, the vegetative plant part has an increased nitrogen content relative to the corresponding wild-type vegetative part of at least about 100%, or between about 50% and about 125%. Preferably, the vegetative plant part has an decreased carbon:nitrogen content relative to the corresponding wild-type vegetative part of at least about 40%, or between about 25% and about 50%. Preferably, the vegetative plant part has a decreased TDF content in the part or at least a part of the transgenic plant relative to the corresponding wild-type vegetative plant part of at least about 30%, or between about 30% and about 65%.

[0146] In an embodiment, the plant is a monocotyledonous plant, or part thereof preferably a leaf, a grain, a stem, a root or an endosperm, which has a total fatty acid content or TAG content which is increased at least 5-fold on a weight basis when compared to a corresponding non-transgenic monocotyledonous plant, or part thereof. Alternatively, the transgenic monocotyledonous plant has endosperm comprising a TAG content which is at least 2.0%, preferably at least 3%, more preferably at least 4% or at least 5%, on a weight basis, or part of the plant, preferably a leaf, a stem, a root, a grain or an endosperm. In an embodiment, the endosperm has a TAG content of at least 2% which is increased at least 5-fold relative to a corresponding non-transgenic endosperm. Preferably, the plant is fully male and female fertile, its pollen is essentially 100% viable, and its grain has a germination rate which is between 70% and 100% relative to corresponding wild-type grain. In an embodiment, the transgenic plant is a progeny plant at least two generations derived from an initial transgenic wheat plant, and is preferably homozygous for the transgenes. In embodiments, the monocotyledonous plant, or part thereof preferably a leaf, stem, grain or endosperm, is further characterised by one or more features as defined in the context of a plant or part thereof of the invention. In embodiments, the monocotyledonous plant, or part thereof preferably a leaf, a grain, stem or an endosperm of the invention preferably has an increased level of monounsaturated fatty acids (MUFA) and/or a lower level of polyunsaturated fatty acids (PUFA) in both the total fatty acid content and in the TAG fraction of the total fatty acid content, such as for example an increased level of oleic acid and a reduced level of LA (18:2), when compared to a corresponding plant or part thereof lacking the genetic modifications and/or exogenous polynucleotide(s). Preferably, the linoleic acid (LA, 18:2) level in the total fatty acid content of the grain or endosperm of the the monocotyledonous plant is reduced by at least 5% and/or the level of oleic acid in the total fatty acid content is increased by at least 5% relative to a corresponding wild-type plant or part thereof, preferably at least 10% or more preferably at least 15%, when compared to a corresponding plant or part thereof lacking the genetic modifications and/or exogenous polynucleotide(s).

[0147] In an embodiment, plant or part thereof isAcrocomia aculeata (macauba palm), Arabidopsis thaliana, Aracinis hypogaea (peanut), Astrocaryum murumuru (murumuru), Astrocaryum vulgare (tucumã), Attalea geraensis (Indaiá-rateiro), Attalea humilis (American oil palm), Attalea oleifera (andaiá), Attalea phalerata (uricuri), Attalea speciosa (babassu), Avena sativa (oats), Beta vulgaris (sugar beet), Brassica sp. such as, for example, Brassica carinata, Brassica juncea, Brassica napobrassica, Brassica napes (canola), Camelina sativa (false flax), Cannabis sativa (hemp), Carthamus tinctorius (safflower), Caryocar brasiliense (pequi), Cocos nucifera (Coconut), Crambe abyssinica (Abyssinian kale), Cucumis melo (melon), Elaeis guineensis (African palm), Glycine max (soybean), Gossypium hirsutum (cotton), Helianthus sp. such as Helianthus annuus (sunflower), Hordeum vulgare (barley), Jatropha curcas (physic nut), Joannesia princeps (arara nut-tree), Lemna sp. (duckweed) such as Lemna aequinoctialis, Lemna disperma, Lemna ecuadoriensis, Lemna gibba (swollen duckweed), Lemna japonica, Lemna minor, Lemna minuta, Lemna obscura, Lemna paucicostata, Lemna perpusilla, Lemna tenera, Lemna trisulca, Lemna turionifera, Lemna valdiviana, Lemna yungensis, Licania rigida (oiticica), Linum usitatissimum (flax), Lupinus angustifolius (lupin), Mauritia flexuosa (buriti palm), Maximiliana maripa (inaja palm), Miscanthus sp. such as Miscanthus×giganteus and Miscanthus sinensis, Nicotiana sp. (tabacco) such as Nicotiana tabacum or Nicotiana benthamiana, Oenocarpus bacaba (bacaba-do-azeite), Oenocarpus bataua (patauá), Oenocarpus distichus (bacaba-de-leque), Oryza sp. (rice) such as Oryza sativa and Oryza glaberrima, Panicum virgatum (switchgrass), Paraqueiba paraensis (mari), Persea amencana (avocado), Pongamia pinnata (Indian beech), Populus trichocarpa, Ricinus communis (castor), Saccharum sp. (sugarcane), Sesamum indicum (sesame), Solanum tuberosum (potato), Sorghum sp. such as Sorghum bicolor, Sorghum vulgare, Theobroma grandiforum (cupuassu), Trifolium sp., Trithrinax brasiliensis (Brazilian needle palm), Triticum sp. (wheat) such as Triticum aestivum and Zea mays (corn).

[0148] In an embodiment, the plant, or part thereof, is a member of a population or collection of at least about 1,500, at least about 3,000 or at least about 5,000 such plants or parts.

[0149] In an embodiment, the TFA content, the the TAG content, the total non-polar lipid content, or the one or more non-polar lipids, and/or the level of the oleic acid or a PUFA in the plant or part thereof is determinable by analysis by using gas chromatography of fatty acid methyl esters obtained from the plant or vegetative part thereof.

[0150] In a further embodiment, wherein the plant part is a leaf and the total non-polar lipid content of the leaf is determinable by analysis using Nuclear Magnetic Resonance (NMR).

[0151] In each of the above embodiments, it is preferred that the plant is a transgenic progeny plant at least two generations derived from an initial transgenic plant, and is preferably homozygous for the transgenes.

[0152] In an embodiment, the plant or the part thereof is phenotypically normal, in that it is not significantly reduced in its ability to grow and reproduce when compared to an unmodified plant or part thereof. In an embodiment, the biomass, growth rate, germination rate, storage organ size, seed size and/or the number of viable seeds produced is not less than 70%, not less than 80% or not less than 90% of that of a corresponding wild-type plant when grown under identical conditions. In an embodiment, the plant is male and female fertile to the same extent as a corresponding wild-type plant and its pollen (if produced) is as viable as the pollen of the corresponding wild-type plant, preferably at least about 75%, or at least about 90%, or close to 100% viable. In an embodiment, the plant produces seed which has a germination rate of at least about 75% or at least about 90% relative to the germination rate of corresponding seed of a wild-type plant, where the plant species produces seed. In an embodiment, the plant of the invention has a plant height which is at least about 75%, or at least about 90% relative to the height of the corresponding wild-type plant grown under the same conditions. A combination of each of these features is envisaged. In an alternative embodiment, the plant of the invention has a plant height which is between 60% and 90% relative to the height of the corresponding wild-type plant grown under the same conditions. In an embodiment, the plant or part thereof of the invention, preferably a plant leaf, does not exhibit increased necrosis, i.e. the extent of necrosis, if present, is the same as that exhibited by a corresponding wild-type plant or part thereof grown under the same conditions and at the same stage of plant development. This feature applies in particular to the plant or part thereof comprising an exogenous polynucleotide which encodes a fatty acid thioesterase such as a FATB thioesterase.

[0153] In another aspect, the present invention provides a population of a at least about 1,500, at least about 3,000 or at least about 5,000 plants, each being a plant of the invention, growing in a field.

[0154] In an embodiment, the first and second exogenous polynucleotides are inserted at the same chromosomal location in the genome of each of the plants, preferably in the nuclear genome of each of the plants.

[0155] In a further aspect, the present invention provides a collection of at least about 1,500, at least about 3,000 or at least about 5,000 vegetative plant parts, each being a vegetative plant part of the invention, wherein the vegetative plant parts have been harvested from plants growing in a field.

[0156] In an embodiment, the first and second exogenous polynucleotides are inserted at the same chromosomal location in the genome of each of the vegetative plant parts, preferably in the nuclear genome of each of the vegetative plant parts.

[0157] Also provided is a storage bin comprising a collection of vegetative plant parts of the invention.

[0158] Further provided is seed of, or obtained from, a plant of the invention, preferably a collection of at least about 1,500, at least about 3,000 at least about 5,000, or at least about 10,000 seeds.

[0159] In another aspect, the present invention provides an extract of a plant or a part thereof of the invention. The extract preferably has a different fatty acid composition relative to a corresponding wild-type extract.

[0160] In an embodiment, the extract comprises the first and second exogenous polynucleotides.

[0161] In an embodiment, the extract is lacking at least 50% or at least 90% of the non-polar lipids of the plant or part thereof.

[0162] In an embodiment, the extract comprises the soluble protein content of the plant or part thereof.

[0163] In an embodiment, the extract comprises the nitrogen content of the plant or part thereof.

[0164] In an embodiment, the extract is lacking at least 50% or at least 90% of the chlorophyll and/or soluble sugars of the plant or part thereof.

[0165] In an embodiment, the extract comprises the carbon content of the plant or part thereof.

[0166] In an embodiment, the extract comprises a dye which binds protein in the extract.

[0167] Extracts of the invention can readily be produced using standard techniques in the art.

[0168] In another aspect, the present invention provides a method of producing a plant extract, the method comprising

[0169] i) obtaining a transgenic plant or part thereof of the invention, or seed of the invention, and

[0170] ii) processing the transgenic plant or part thereof, or seed, to produce the extract.

[0171] In an embodiment, step ii) comprising producing two or more fractions from the transgenic plant or part thereof, or seed, and selecting at least one, but not all of the fractions.

[0172] In an embodiment, the selected fraction(s) has one or more of the following features;

[0173] i) comprises the first and second exogenous polynucleotides,

[0174] ii) is lacking at least 50% or at least 90% of the non-polar lipids of the plant or part thereof,

[0175] iii) comprises the soluble protein content of the plant or part thereof,

[0176] iv) comprises the nitrogen content of the plant or part thereof,

[0177] v) is lacking at least 50% or at least 90% of the chlorophyll and/or soluble sugars of the plant or part thereof, and

[0178] vi) comprises the carbon content of the plant or part thereof.

[0179] In a further aspect, the present invention provides a process for selecting a plant or a part thereof with a desired phenotype, the process comprising

[0180] i) obtaining a plurality of candidate plants, or parts thereof, which each comprise
[0181] a) a first exogenous polynucleotide which encodes a transcription factor polypeptide that increases the expression of one or more glycolytic and/or fatty acid biosynthetic genes in a plant or part thereof, and
[0182] b) a second exogenous polynucleotide which encodes a polypeptide involved in the biosynthesis of one or more non-polar lipids, wherein each exogenous polynucleotide is operably linked to a promoter which is capable of directing expression of the polynucleotide in the plant, or part thereof,

[0183] ii) analysing lipid in the plurality of parts, or at least a part of each plant in the plurality of candidate plants, from step i),

[0184] iii) analysing the plurality of parts, or at least a part of each plant in the plurality of candidate plants, from step i) for one or more or all of
[0185] a) soluble protein content,
[0186] b) nitrogen content,
[0187] c) carbon:nitrogen ratio,
[0188] d) photosynthetic gene expression,
[0189] e) photosynthetic capacity,
[0190] f) total dietary fibre (TDF) content,
[0191] g) carbon content, and
[0192] h) energy content, and

[0193] iv) selecting a plant or part thereof which comprises an increased triacylglycerol (TAG) content in the part or at least a part of the plant relative to a corresponding wild-type plant or part thereof and a desired phenotype selected from one or more or all of the following;
[0194] A) an increased soluble protein content in the part or at least a part of the plant relative to a corresponding wild-type plant or part thereof,
[0195] B) an increased nitrogen content in the part or at least a part of the plant relative to a corresponding wild-type plant or part thereof;
[0196] C) decreased carbon:nitrogen ratio in the part or at least a part of the plant relative to a corresponding wild-type plant or part thereof,
[0197] D) increased photosynthetic gene expression in the part or at least a part of the plant relative to a corresponding wild-type plant or part thereof,
[0198] E) increased photosynthetic capacity in the part or at least a part of the plant relative to a corresponding wild-type plant or part thereof,
[0199] F) decreased total dietary fibre (TDF) content in the part or at least a part of the plant relative to a corresponding wild-type plant or part thereof,
[0200] G) increased carbon content in the part or at least a part of the plant relative to a corresponding wild-type plant or part thereof, and
[0201] H) increased energy content in the part or at least a part of the plant relative to a corresponding wild-type plant or part thereof.

[0202] In an embodiment, the process further comprises a step of obtaining seed or a progeny plant from the transgenic plant, wherein the seed or progeny plant comprises the exogenous polynucleotides.

[0203] In an embodiment, the increased triacylglycerol (TAG) content is determined by analysing one or more of the total fatty acid content, TAG content, fatty acid composition, by any means, which might or might not involve first extracting the lipid.

[0204] In yet another embodiment, the selected plant or part thereof has one or more of the features as defined herein.

[0205] In another aspect, the present invention provides a method of producing a plant which has integrated into its genome a set of exogenous polynucleotides and/or genetic modifications as defined herein, the method comprising the steps of

[0206] i) crossing two parental plants, wherein one plant comprises at least one of the exogenous polynucleotides and/or at least one genetic modifications as defined herein, and the other plant comprises at least one of the exogenous polynucleotides and/or at least one genetic modifications as defined herein, and wherein between them the two parental plants comprise a set of exogenous polynucleotides and/or genetic modifications as defined herein,

[0207] ii) screening one or more progeny plants from the cross for the presence or absence of the set of exogenous polynucleotides and/or genetic modifications as defined herein, and

[0208] iii) selecting a progeny plant which comprise the set of exogenous polynucleotides and/or genetic modifications as defined herein and which has a desired trait determined using the process of the invention, thereby producing the plant.

[0209] In another aspect, the present invention provides a process for producing a feedstuff, the process comprising admixing a transgenic plant or part thereof of any one of the invention, seed of the invention, or an extract of the invention, with at least one other food ingredient.

[0210] In another aspect, the present invention provides a feedstuff comprising a transgenic plant or part thereof of the invention, seed of the invention, or an extract of the invention.

[0211] In an embodiment, the feedstuff is silage, pellets or hay.

[0212] In yet a further aspect, the present invention provides a process for feeding an animal, the process comprising providing to the animal a transgenic plant or part thereof of the invention, seed of the invention, an extract of the invention, or a feedstuff of of the invention.

[0213] In an embodiment, the animal ingests an increased amount of nitrogen, protein, carbon and/or energy potential relative to when the animal ingests the same amount on a dry weight basis of a corresponding wild-type plant or part thereof, seed or extract or feedstuff produced from the corresponding wild-type plant or part thereof.

[0214] In another aspect, the present invention provides a process for producing an industrial product, the process comprising the steps of:

[0215] i) obtaining a transgenic plant or part thereof of the invention, or seed of the invention, and

[0216] ii) either
[0217] a) converting at least some of the lipid in the plant or part thereof, or seed of step i) to the industrial product by applying heat, chemical, or enzymatic means, or any combination thereof, to the lipid in situ in the plant or part thereof, or seed, or
[0218] b) physically processing the plant or part thereof, or seed of step i), and subsequently or simultaneously converting at least some of the lipid in the processed plant or part thereof, or seed to the industrial product by applying heat, chemical, or enzymatic means, or any combination thereof, to the lipid in the processed plant or part thereof, or seed, and

[0219] iii) recovering the industrial product,

thereby producing the industrial product.

[0220] In an embodiment, the plant part is a vegetative plant part.

[0221] In an embodiment, the step of physically processing the plant or part thereof, or seed comprises one or more of rolling, pressing, crushing or grinding the plant or part thereof, or seed.

[0222] In an embodiment, the process comprises the steps of:

[0223] (a) extracting at least some of the non-polar lipid content of the plant or part thereof, or seed as non-polar lipid, and

[0224] (b) recovering the extracted non-polar lipid,

wherein steps (a) and (b) are performed prior to the step of converting at least some of the lipid in the plant or part thereof, or seed to the industrial product. In an embodiment, the extracted non-polar lipid comprises triacylglycerols, wherein the triacylglycerols comprise at least 90%, preferably at least 95%, of the extracted lipid.

[0225] In an embodiment, the industrial product is a hydrocarbon product such as fatty acid esters, preferably fatty acid methyl esters and/or a fatty acid ethyl esters, an alkane such as methane, ethane or a longer-chain alkane, a mixture of longer chain alkanes, an alkene, a biofuel, carbon monoxide and/or hydrogen gas, a bioalcohol such as ethanol, propanol, or butanol, biochar, or a combination of carbon monoxide, hydrogen and biochar.

[0226] In another aspect, the present invention provides a process for producing extracted lipid, the process comprising the steps of:

[0227] i) obtaining a transgenic plant or part thereof of the invention, or seed of the invention,

[0228] ii) extracting lipid from the plant or part thereof, or seed, and

[0229] iii) recovering the extracted lipid, thereby producing the extracted lipid.

[0230] In an embodiment, a process of extraction of the comprises one or more of drying, rolling, pressing, crushing or grinding the plant or part thereof, or seed, and/or purifying the extracted lipid or seedoil.

[0231] In an embodiment, the process uses an organic solvent in the extraction process to extract the oil.

[0232] In a further embodiment, the process comprises recovering the extracted lipid or oil by collecting it in a container and/or one or more of degumming, deodorising, decolourising, drying, fractionating the extracted lipid or oil, removing at least some waxes and/or wax esters from the extracted lipid or oil, or analysing the fatty acid composition of the extracted lipid or oil.

[0233] In an embodiment, the volume of the extracted lipid or oil is at least 1 litre.

[0234] In a further embodiment, one or more or all of the following features apply:

[0235] (i) the extracted lipid or oil comprises triacylglycerols, wherein the triacylglycerols comprise at least 90%, preferably at least 95% or at least 96%, of the extracted lipid or oil,

[0236] (ii) the extracted lipid or oil comprises free sterols, steroyl esters, steroyl glycosides, waxes or wax esters, or any combination thereof, and

[0237] (iii) the total sterol content and/or composition in the extracted lipid or oil is significantly different to the sterol content and/or composition in the extracted lipid or oil produced from a corresponding plant or part thereof, or seed.

[0238] In an embodiment, the process further comprises converting the extracted lipid or oil to an industrial product.

[0239] In an embodiment, the industrial product is a hydrocarbon product such as fatty acid esters, preferably fatty acid methyl esters and/or a fatty acid ethyl esters, an alkane such as methane, ethane or a longer-chain alkane, a mixture of longer chain alkanes, an alkene, a biofuel, carbon monoxide and/or hydrogen gas, a bioalcohol such as ethanol, propanol, or butanol, biochar, or a combination of carbon monoxide, hydrogen and biochar.

[0240] In a further embodiment, the plant part is an aerial plant part or a green plant part, preferably a vegetative plant part such as a plant leaf or stem. In an alternative embodiment, the plant part is a tuber or beet, such as a potato (Solanum tuberosum) tuber or a sugar beet.

[0241] In yet a further embodiment, the process further comprises a step of harvesting the plant or part thereof such as a vegetative plant part, tuber or beet, or seed, preferably with a mechanical harvester.

[0242] In another embodiment, the level of a lipid in the plant or part thereof, or seed and/or in the extracted lipid or oil is determinable by analysis by using gas chromatography of fatty acid methyl esters prepared from the extracted lipid or oil.

[0243] In yet another embodiment, the process further comprises harvesting the part from a plant.

[0244] In an embodiment, the plant part is a vegetative plant part which comprises a total non-polar lipid content of at least about 18%, at least about 20%, at least about 25%, at least about 30%, at least about 35%, at least about 40%, at least about 45%, at least about 50%, at least about 55%, at least about 60%, at least about 65%, at least about 70%, between 18% and 75%, between about 20% and 75%, between about 30% and 75%, between about 40% and 75%, between about 50% and 75%, between about 60% and 75%, or between about 25% and 50% (w/w dry weight).

[0245] In a further embodiment, the plant part is a vegetative plant part which comprises a total TAG content of at least about 18%, at least about 20%, at least about 25%, at least about 30%, at least about 35%, at least about 40%, at least about 45%, at least about 50%, at least about 55%, at least about 60%, at least about 65%, at least about 70%, between 18% and 75%, between about 20% and 75%, between about 30% and 75%, between about 40% and 75%, between about 50% and 75%, between about 60% and 75%, or between about 25% and 50% (w/w dry weight).

[0246] In another embodiment, the plant part is a vegetative plant part which comprises a total non-polar lipid content of at least about 11%, at least about 12%, at least about 15%, at least about 20%, at least about 25%, at least about 30%, at least about 35%, at least about 40%, at least about 45%, at least about 50%, at least about 55%, at least about 60%, at least about 65%, at least about 70%, between 8% and 75%, between 10% and 75%, between 11% and 75%, between about 15% and 75%, between about 20% and 75%, between about 30% and 75%, between about 40% and 75%, between about 50% and 75%, between about 60% and 75%, or between about 25% and 50% (w/w dry weight), and wherein the vegetative plant part is from a 16:3 plant.

[0247] In yet another embodiment, the plant part is a vegetative plant part which comprises a total TAG content of at least about 11%, at least about 12%, at least about 15%, at least about 20%, at least about 25%, at least about 30%, at least about 35%, at least about 40%, at least about 45%, at least about 50%, at least about 55%, at least about 60%, at least about 65%, at least about 70%, between 8% and 75%, between 10% and 75%, between 11% and 75%, between about 15% and 75%, between about 20% and 75%, between about 30% and 75%, between about 40% and 75%, between about 50% and 75%, between about 60% and 75%, or between about 25% and 50% (w/w dry weight), and wherein the vegetative plant part is from a 16:3 plant.

[0248] In another aspect, the present invention provides a process for producing seed, the process comprising:

[0249] i) growing a plant of the invention, and

[0250] ii) harvesting seed from the plant.

[0251] In an embodiment, the above process comprises growing a population of at least about 1,500, at least about 3,000 or at least about 5,000 plants, each being a plant of the invention, and harvesting seed from the population of plants.

[0252] Also provided is recovered or extracted lipid or soluble protein obtainable from a transgenic plant or part thereof of the invention, or seed of the invention, or obtainable by the process of the invention.

[0253] Also provided is an industrial product produced by the process of the invention, which is a hydrocarbon product such as fatty acid esters, preferably fatty acid methyl esters and/or a fatty acid ethyl esters, an alkane such as methane, ethane or a longer-chain alkane, a mixture of longer chain alkanes, an alkene, a biofuel, carbon monoxide and/or hydrogen gas, a bioalcohol such as ethanol, propanol, or butanol, biochar, or a combination of carbon monoxide, hydrogen and biochar.

[0254] In a further aspect, the present invention provides for the use of a transgenic plant or part thereof of the invention, seed of the invention, extract of the invention or the recovered or extracted lipid or soluble protein of the invention for the manufacture of an industrial product.

[0255] Examples of industrial products of the invention include, but are not limited to, a hydrocarbon product such as fatty acid esters, preferably fatty acid methyl esters and/or a fatty acid ethyl esters, an alkane such as methane, ethane or a longer-chain alkane, a mixture of longer chain alkanes, an alkene, a biofuel, carbon monoxide and/or hydrogen gas, a bioalcohol such as ethanol, propanol, or butanol, biochar, or a combination of carbon monoxide, hydrogen and biochar.

[0256] In a further aspect, the present invention provides a process for producing fuel, the process comprising:

[0257] i) reacting the lipid of the invention with an alcohol, optionally, in the presence of a catalyst, to produce alkyl esters, and

[0258] ii) optionally, blending the alkyl esters with petroleum based fuel.

[0259] In an embodiment of the above process, the alkyl esters are methyl esters.

[0260] In yet another aspect, the present invention provides a process for producing a synthetic diesel fuel, the process comprising:

[0261] i) converting the lipid in a transgenic plant or part thereof of the invention, or seed of the invention to a bio-oil by a process comprising pyrolysis or hydrothermal processing or to a syngas by gasification, and

[0262] ii) converting the bio-oil to synthetic diesel fuel by a process comprising fractionation, preferably selecting hydrocarbon compounds which condense between about 150° C. to about 200° C. or between about 200° C. to about 300° C., or converting the syngas to a biofuel using a metal catalyst or a microbial catalyst.

[0263] In a further aspect, the present invention provides a process for producing a biofuel, the process comprising converting the lipid in a transgenic plant or part thereof of the invention, or seed of the invention to bio-oil by pyrolysis, a bioalcohol by fermentation, or a biogas by gasification or anaerobic digestion.

[0264] In an embodiment of the above process, the part is a vegetative plant part.

[0265] The present invention also relates to plants and vegetative plant parts, preferably from Sorghum sp. and/or Zea mays, with an enhanced total fatty acid content and their uses.

[0266] Thus, in another aspect, the present invention provides in process for producing a feedstuff for an animal, the process comprising the steps of

[0267] (i) harvesting vegetative plant parts from a Sorghum sp. and/or a Zea mays plant, the vegetative plant parts comprising a total fatty acid (TFA) content which comprises fatty acids esterified in the form of triacylglycerols (TAG) and fatty acids in the form of lipids other than TAG, wherein the vegetative plant parts comprise a TFA content of about 5% (w/w dry weight), and one or more of the steps

[0268] (ii) admixing the harvested plant parts with at least one other feed ingredient,

[0269] (iii) baling the harvested plant parts,

[0270] (iv) processing the harvested plant parts, preferably by chopping, cutting, drying, pressing or pelleting the plant parts, into a form that is suitable for consumption by the animal, and

[0271] (v) storing the harvested plant parts under conditions of reduced oxygen for a period of time such that at least some of the carbohydrates in the plant parts are fermented to organic acids.

[0272] In an embodiment, the vegetative plant parts have a TAG/TFA Quotient (TTQ) of between 0.01 and 0.6. In an embodiment, the vegetative plant parts have a TTQ of between 0.01 and 0.55, or between 0.01 and 0.5, or about 0.1, or about 0.2 or about 0.3, or about 0.4 or about 0.5. Preferably, the TTQ is between 0.60 and 0.84, which corresponds to a TAG:TFA ratio of between 1.5:1 and 5:1; or between 0.84 and 0.95 which corresponds to a TAG:TFA ratio of between 5:1 and 20:1.

[0273] In an embodiment, the vegetative plant parts comprise an average TFA content of about 6%, or about 8%, or about 9% or about 10% (w/w dry weight).

[0274] In an embodiment, the TFA content of the vegetative plant parts comprises an oleic acid content which is increased by at least 2% or at least 3% relative to the oleic acid content of a corresponding wild-type vegetative plant part.

[0275] In an embodiment, the TFA content of the vegetative plant parts comprises a palmitic acid content which is increased by at least 2% or at least 3% relative to the palmitic acid content of a corresponding wild-type vegetative plant part.

[0276] In an embodiment, the TFA content of the vegetative plant parts comprises a α-linoleic acid (ALA) content which is decreased by at least 2% or at least 3% relative to the ALA content of a corresponding wild-type vegetative plant part.

[0277] In an embodiment, one or more or all of the following features apply:

[0278] (i) the vegetative plant parts are leaves and/or stems or parts thereof which comprise one or more of an increased carbon content, an increased energy content, an increased soluble protein content, a reduced starch content, a reduced total dietary fibre (TDF) content and an increased nitrogen content, each on a weight basis relative to a corresponding wild-type leaf or stem or parts thereof from a wild-type Sorghum sp. or Zea mays plant at the same stage of growth,

[0279] (ii) the TFA content of the vegetative plant parts is at least about 6%, at least about 7%, at least about 8%, at least about 9%, at least about 10%, at least about 11%, at least about 12%, at least about 15%, at least about 20%, at least about 25%, at least about 30%, at least about 35%, at least about 40%, at least about 45%, at least about 50%, at least about 55%, at least about 60%, at least about 65%, at least about 70%, between about 6% and about 20%, between 8% and 75%, between 10% and 75%, between 11% and 75%, between about 15% and 75%, between about 20% and 75%, between about 30% and 75%, between about 40% and 75%, between about 50% and 75%, between about 60% and 75%, or between about 25% and 50% (w/w dry weight) TFA,

[0280] (iii) the fatty acids esterified in the form of TAG in the vegetative plant parts is at least about 1%, at least about 2%, at least about 3%, at least about 4%, at least about 5%, at least about 6%, at least about 7%, at least about 8%, at least about 9%, at least, about 10%, at least about 11%, at least about 12%, at least about 15%, at least about 20%, at least about 25%, at least about 30%, at least about 35%, at least about 40%, at least about 45%, at least about 50%, at least about 55%, at least about 60%, at least about 65%, at least about 70%, between about 6% and about 20%, between 8% and 75%, between 10% and 75%, between 11% and 75%, between about 15% and 75%, between about 20% and 75%, between about 30% and 75%, between about 40% and 75%, between about 50% and 75%, between about 60% and 75%, or between about 25% and 50% (w/w dry weight),

[0281] (iv) the vegetative plant parts comprise an increased content of a WRI1 polypeptide, an increased content of a DGAT polypeptide, and a decreased content of a SDP1 polypeptide, each relative to a corresponding wild-type vegetative plant part,

[0282] (v) the vegetative plant parts comprise an increased content of a WRI1 polypeptide, an increased content of a DGAT polypeptide, and an increased content of a LEC2 polypeptide, each relative to a corresponding wild-type vegetative plant part,

[0283] (vi) the vegetative plant parts comprise an increased content of a PDAT or DGAT polypeptide, a decreased content of a TGD polypeptide, and a decreased content of a SDP1 polypeptide, each relative to a corresponding wild-type vegetative plant part, and

[0284] (vii) the vegetative plant parts comprise a decreased content of a TAG lipase such as a SDP1 TAG lipase, a decreased content of a TGD polypeptide such as a TGD5 polypeptide, and optionally a decreased content of a TST polypeptide such as a TST1 polypeptide, each decrease being relative to a corresponding wild-type vegetative plant part.

[0285] In another aspect, the present invention provides a process for producing a feedstuff for an animal, the process comprising the steps of

[0286] (i) harvesting vegetative plant parts from a Sorghum sp. and/or a Zea mays plant, the vegetative plant parts comprising a total fatty acid content which comprises fatty acids esterified in the form of triacylglycerols (TAG) and fatty acids in the form of lipids other than TAG, wherein the vegetative plant parts comprise a total TAG content of about 6% (w/w dry weight) and preferably have a ratio of the fatty acids esterified in the form of TAG to the fatty acids in the form of lipids other than TAG which is between 20:1 and 1.5:1 or between 5:1 and 2:1, and one or more of the steps

[0287] (ii) admixing the harvested plant parts with at least one other feed ingredient,

[0288] (iii) baling the harvested plant parts,

[0289] (iv) processing the harvested plant parts, preferably by chopping, cutting, drying, pressing or pelleting the plant parts, into a form that is suitable for consumption by the animal, and

[0290] (v) storing the harvested plant parts under conditions of reduced oxygen for a period of time such that at least some of the carbohydrates in the plant parts are fermented to organic acids.

[0291] In an embodiment of the two above aspects, one or more or all of the following features apply:

[0292] (i) the vegetative plant parts are harvested from the plant between the time of first flowering of the plant and first maturity of seed,

[0293] (ii) the Sorghum sp. plant is a Sorghum bicolor plant,

[0294] (iii) the vegetative plant parts include leaves and/or stems or parts thereof,

[0295] (iv) the vegetative plant parts comprise an average total fatty acid content of about 8% or about 10% (w/w dry weight),

[0296] (v) the total fatty acid content of the vegetative plant parts comprises an oleic acid content which is increased by at least 2% or at least 3% relative to the oleic acid content of a corresponding wild-type vegetative plant part,

[0297] (vi) the total fatty acid content of the vegetative plant parts comprises a palmitic acid content which is increased by at least 2% or at least 3% relative to the palmitic acid content of a corresponding wild-type vegetative plant part,

[0298] (vii) the total fatty acid content of the vegetative plant parts comprises a α-linoleic acid (ALA) content which is decreased by at least 2% or at least 3% relative to the ALA content of a corresponding wild-type vegetative plant part,

[0299] (viii) the vegetative plant parts comprise an increased soluble protein content relative to a corresponding wild-type vegetative plant part,

[0300] (ix) the vegetative plant parts comprise an increased nitrogen content relative to a corresponding wild-type vegetative plant part,

[0301] (x) the vegetative plant parts comprise a decreased carbon:nitrogen ratio relative to a corresponding wild-type vegetative plant part,

[0302] (xi) leaves of the Sorghum sp. and/or Zea mays plant comprises an increased photosynthetic capacity relative to a corresponding wild-type leaf,

[0303] (xii) the vegetative plant parts comprise a decreased total dietary fibre (TDF) content relative to a corresponding wild-type vegetative plant part,

[0304] (xiii) the vegetative plant parts comprise an increased carbon content relative to a corresponding wild-type vegetative plant part,

[0305] (xiv) the vegetative plant parts comprise an increased transcription factor polypeptide content relative to a corresponding wild-type vegetative plant part, wherein the transcription factor polypeptide is selected from the group consisting of Wrinkled 1 (WRI1), Leafy Cotyledon 1 (LEC1), LEC1-like, Leafy Cotyledon 2 (LEC2), BABY BOOM (BBM), FUS3, ABI3, ABI4, ABI5, Dof4 and Dof11, or the group consisting of MYB73, bZIP53, AGL15, MYB115, MYB118, TANMEI, WUS, GFR2a1, GFR2a2 and PHR1,

[0306] (xv) the vegetative plant parts comprise an increased fatty acid acyltransferase polypeptide content relative to a corresponding wild-type vegetative plant part, wherein the acyltransferase is diacylglycerol acyltransferase (DGAT) and/or phospholipid:diacylglycerol acyltransferase (PDAT),

[0307] (xvi) the vegetative plant parts comprise a decreased TAG lipase polypeptide content relative to a corresponding wild-type vegetative plant part,

[0308] (xvii) the vegetative plant parts comprise a decreased trigalactosyldiacylglycerol (TGD) polypeptide content relative to a corresponding wild-type vegetative plant part,

[0309] (xviii) the vegetative plant parts comprise an increased content of an oil body coating (OBC) polypeptide or a lipid droplet associated polypeptide (LDAP) relative to a corresponding wild-type vegetative plant part,

[0310] (xix) the vegetative plant parts comprise an increased total protein content relative to a corresponding wild-type vegetative plant part,

[0311] (xx) the vegetative plant parts comprise an increased chlorophyll content relative to a corresponding wild-type vegetative plant part,

[0312] (xxi) the vegetative plant parts comprise an increased energy content on a weight basis relative to a corresponding wild-type vegetative plant part,

[0313] (xxii) the vegetative plant parts comprise an increased phospholipid and/or galactolipid content, preferably an increased monogalactosyl-diglyceride (MDGD) and/or increased digalactosyl-diglyceride (DGDG) content, relative to a corresponding wild-type vegetative plant part,

[0314] (xxiii) the ratio of the fatty acids esterified in the form of TAG to the fatty acids in the form of lipids other than TAG is about 4, about 3.5, about 3, or about 2.5,

[0315] (xxiv) the TTQ is about 0.1, or about 0.2 or about 0.3, or about 0.4 or about 0.5, or about 0.6, or about 0.65, or about 0.7, or about 0.75, or about 0.8, or about 0.81, or about 0.82, or about 0.83, or about 0.84, or about 0.85, or about 8.6, or about 8.7, or about 8.8, or about 8.9, or about 0.9, or about 0.91, or about 0.92, or about 0.93, or about 0.94, or about 0.95,

[0316] (xxv) the at least one other feed ingredient comprises one or more or all of: edible macronutrients, vitamins, minerals (such as calcium, phosphorus, magnesium and sulfur), hay such as alfalfa hay, brewers grain, seed meal (canola or soy), cottonseed, molasses, additional amino acids (such as lysine and methionine) non-protein nitrogen supplies (such as urea),

[0317] (xxvi) the period of time is between one week and 52 weeks,

[0318] (xxvii) the organic acids comprise acetic acid, propionic acid or butyric acid, or any combination thereof,

[0319] (xxviii) the feedstuff is silage, pellets or hay, and

[0320] (xxix) the vegetative plant parts are stored for a period of time before being mixed with the at least one other feed ingredient, in each case where the corresponding wild-type plant part is harvested from a wild-type Sorghum sp. or Zea mays plant at the same stage of growth.

[0321] In a further embodiment of the above two aspects, one or more or all of the following features apply:

[0322] (i) the vegetative plant parts are leaves and/or stems or parts thereof which comprise one or more of an increased carbon content, an increased energy content, an increased soluble protein content and an increased nitrogen content, each on a weight basis relative to a corresponding wild-type leaf or stem or parts thereof from a wild-type Sorghum sp. or Zea mays plant at the same stage of growth,

[0323] (ii) the total fatty acid content of the vegetative plant parts is at least about 8%, at least about 9%, at least about 10%, at least about 11%, at least about 12%, at least about 15%, at least about 20%, at least about 25%, at least about 30%, at least about 35%, at least about 40%, at least about 45%, at least about 50%, at least about 55%, at least about 60%, at least about 65%, at least about 70%, between about 6% and about 20%, between 8% and 75%, between 10% and 75%, between 11% and 75%, between about 15% and 75%, between about 20% and 75%, between about 30% and 75%, between about 40% and 75%, between about 50% and 75%, between about 60% and 75%, or between about 25% and 50% (w/w dry weight),

[0324] (iii) the fatty acids esterified in the form of TAG in the vegetative plant parts is at least about 8%, at least about 9%, at least about 10%, at least about 11%, at least about 12%, at least about 15%, at least about 20%, at least about 25%, at least about 30%, at least about 35%, at least about 40%, at least about 45%, at least about 50%, at least about 55%, at least about 60%, at least about 65%, at least about 70%, between about 6% and about 20%, between 8% and 75%, between 10% and 75%, between 11% and 75%, between about 15% and 75%, between about 20% and 75%, between about 30% and 75%, between about 40% and 75%, between about 50% and 75%, between about 60% and 75%, or between about 25% and 50% (w/w dry weight),

[0325] (iv) the vegetative plant parts comprise an increased content of a WRI1 polypeptide, an increased content of a DGAT polypeptide, and a decreased content of a SDP1 polypeptide, each relative to a corresponding wild-type vegetative plant part,

[0326] (v) the vegetative plant parts comprise an increased content of a PDAT or DGAT polypeptide, a decreased content of a TGD polypeptide, and a decreased content of a SDP1 polypeptide, each relative to a corresponding wild-type vegetative plant part, and

[0327] (vi) the vegetative plant parts comprise a decreased content of a TAG lipase polypeptide such as a SDP1 polypeptide, a decreased content of a TGD polypeptide such as a TGD5 polypeptide, and optionally a decreased content of a TST polypeptide such as a TST1 polypeptide, each relative to a corresponding wild-type vegetative plant part.

[0328] In an embodiment, the vegetative plant parts comprise an increased content of one or more sucrose metabolism polypeptides selected from the group consisting of an invertase and a sucrose transport polypeptide. The invertase may be a vacuolar invertase or a cytosolic invertase, and the sucrose transport polypeptide may be, for example, a SUS4 or SUT2 that is naturally located to the vacuolar membrane.

[0329] In another aspect, the present invention provides a process for feeding an animal, the process comprising providing vegetative plant parts from a Sorghum sp. and/or a Zea mays plant to the animal, the vegetative plant parts comprising a total fatty acid (TFA) content which comprises fatty acids esterified in the form of triacylglycerols (TAG) and fatty acids in the form of lipids other than TAG, wherein the vegetative plant parts comprise a TFA content of about 5% (w/w dry weight), preferably between about 6% and about 20%.

[0330] In an embodiment of the above aspect, the vegetative plant parts have a TTQ of between 0.01 and 0.6. In an embodiment, the vegetative plant parts have a TTQ of between 0.01 and 0.55, or between 0.01 and 0.5, or about 0.1, or about 0.2 or about 0.3, or about 0.4 or about 0.5. Preferably, the TTQ is between 0.60 and 0.84 or between 0.84 and 0.95.

[0331] In another aspect, the present invention provides a process for feeding an animal, the process comprising providing vegetative plant parts from a Sorghum sp. and/or a Zea mays plant to the animal, the vegetative plant parts comprising a total fatty acid content which comprises fatty acids esterified in the form of triacylglycerols (TAG) and fatty acids in the form of lipids other than TAG, wherein the vegetative plant parts comprise a total TAG content of about 6% (w/w dry weight), preferably between about 6% and about 20%, and preferably have a ratio of the fatty acids esterified in the form of TAG to the fatty acids in the form of lipids other than TAG which is between 20:1 and 1.5:1 or between 5:1 and 2:1.

[0332] In an embodiment of the two above aspects,

[0333] (i) the vegetative plant parts are comprised in a Sorghum sp. and/or Zea mays plant growing in a field,

[0334] (ii) the vegetative plant parts are harvested from the Sorghum sp. and/or Zea mays plant and/or admixed with at least one other feed ingredient,

[0335] (iii) the vegetative plant parts were processed post-harvest, preferably by chopping, cutting, drying, pressing or pelleting the plant parts, into a form that is more suitable for consumption by the animal,

[0336] (iv) the harvested plant parts were stored under conditions of reduced oxygen for a period of time such that at least some of the carbohydrates in the plant parts are fermented to organic acids prior to being provided to the animal, and

[0337] (v) the harvested plant parts are stored for a period of time between harvest and providing them to the animal.

[0338] In a further embodiment of the two above aspects, the animal ingests an increased amount of nitrogen, protein, carbon and/or energy potential relative to when the animal ingests the same amount on a dry weight basis of a corresponding feedstuff produced using an equivalent amount of wild-type Sorghum sp. and/or Zea mays plant or parts thereof.

[0339] In a further embodiment, the process is further characterised by one or more features as described in the context of the above aspects of the invention.

[0340] In a further aspect, the present invention provides a feedstuff for an animal, comprising harvested vegetative plant parts from a Sorghum sp. and/or a Zea mays plant, the vegetative plant parts comprising a total fatty acid (TFA) content which comprises fatty acids esterified in the form of triacylglycerols (TAG) and fatty acids in the form of lipids other than TAG, wherein the vegetative plant parts comprise a TFA content of about 5% (w/w dry weight), preferably between about 6% and about 20%, wherein

[0341] (i) the harvested plant parts are mixed with at least one other feed ingredient,

[0342] (ii) the harvested plant parts were baled after harvest,

[0343] (iii) the harvested plant parts were processed, preferably by chopping, cutting, drying, pressing or pelleting the plant parts, into a form that is suitable for consumption by the animal, and

[0344] (iv) the harvested plant parts were stored under conditions of reduced oxygen for a period of time such that at least some of the carbohydrates in the plant parts were fermented to organic acids.

[0345] In an embodiment, the vegetative plant parts have a TTQ of between 0.01 and 0.6. In an embodiment, the vegetative plant parts have a TTQ of between 0.01 and 0.55, or between 0.01 and 0.5, or bout 0.1, or about 0.2 or about 0.3, or about 0.4 or about 0.5. Preferably, the TTQ is between 0.60 and 0.84 or between 0.84 and 0.95.

[0346] In another aspect, the present invention provides a feedstuff for an animal, comprising harvested vegetative plant parts from a Sorghum sp. and/or a Zea mays plant, the vegetative plant parts comprising a total fatty acid content which comprises fatty acids esterified in the form of triacylglycerols (TAG) and fatty acids in the form of lipids other than TAG, wherein the vegetative plant parts comprise a total TAG content of about 6% (w/w dry weight), preferably between about 6% and about 20%, and preferably have a ratio of the fatty acids esterified in the form of TAG to the fatty acids in the form of lipids other than TAG which is between 20:1 and 1.5:1 or between 5:1 and 2:1, wherein

[0347] (i) the harvested plant parts are mixed with at least one other feed ingredient,

[0348] (ii) the harvested plant parts were baled after harvest,

[0349] (iii) the harvested plant parts were processed, preferably by chopping, cutting, drying, pressing or pelleting the plant parts, into a form that is suitable for consumption by the animal, and

[0350] (iv) the harvested plant parts were stored under conditions of reduced oxygen for a period of time such that at least some of the carbohydrates in the plant parts were fermented to organic acids.

[0351] In an embodiment, the feedstuff is silage, pellets or hay.

[0352] In a further embodiment, the feedstuff is further characterised by one or more features as described in the context of the above aspects of the invention.

[0353] In another aspect, the present invention provides a Sorghum sp. or Zea mays cell other than a seed cell, comprising a total fatty acid (TFA) content which comprises fatty acids esterified in the form of triacylglycerols (TAG) and fatty acids in the form of lipids other than TAG, wherein the cell comprises a TFA content of about 5% (w/w dry weight), preferably between about 6% and about 20%.

[0354] In an embodiment, the total fatty acid content of the cell has a TTQ of between 0.01 and 0.6. In an embodiment, the total fatty acid content of the cell has a TTQ of between 0.01 and 0.55, or between 0.01 and 0.5, or bout 0.1, or about 0.2 or about 0.3, or about 0.4 or about 0.5. Preferably, the TTQ is between 0.60 and 0.84 or between 0.84 and 0.95.

[0355] In an embodiment, the TFA content of the cell comprises an oleic acid content which is increased by at least 2% or at least 3% relative to the oleic acid content of a corresponding wild-type cell.

[0356] In an embodiment, the TFA content of the cell comprises a palmitic acid content which is increased by at least 2% or at least 3% relative to the palmitic acid content of a corresponding wild-type cell.

[0357] In an embodiment, the TFA content of the cell comprises a α-linoleic acid (ALA) content which is decreased by at least 2% or at least 3% relative to the ALA content of a corresponding wild-type cell.

[0358] In an embodiment, the cell is in a vegetative part of a plant and comprises a TAG content of at least about 1%, at least about 2%, at least about 3%, at least about 4%, at least about 5%, at least about 6%, at least about 7%, at least about 8%, at least about 10%, at least about 11%, at least about 12%, at least about 15%, at least about 20%, at least about 25%, at least about 30%, at least about 35%, at least about 40%, at least about 45%, at least about 50%, at least about 55%, at least about 60%, at least about 65%, at least about 70%, between about 6% and about 20%, between 8% and 75%, between 10% and 75%, between 11% and 75%, between about 15% and 75%, between about 20% and 75%, between about 30% and 75%, between about 40% and 75%, between about 50% and 75%, between about 60% and 75%, or between about 25% and 50% (w/w dry weight).

[0359] In a further embodiment, the cell is from or in a plant leaf or stem, before the plant flowers, and the cell comprises a TFA content and/or a total non-polar fatty acid content of at least about 6%, at least about 7%, at least about 8%, at least about 10%, at least about 11%, between 8% and 15%, or between 9% and 12% on a weight basis, preferably between about 6% and about 20%.

[0360] In another aspect, the present invention provides a Sorghum sp. or Zea mays cell other than a seed cell, comprising a total fatty acid content which comprises fatty acids esterified in the form of triacylglycerols (TAG) and fatty acids in the form of lipids other than TAG, wherein the cell comprises a total TAG content of about 6% (w/w dry weight), preferably between about 6% and about 20%, and has a ratio of the fatty acids esterified in the form of TAG to the fatty acids in the form of lipids other than TAG which is between 20:1 and 1.5:1 or between 5:1 and 2:1.

[0361] In another aspect, the present invention provides a Sorghum sp. or Zea mays cell, comprising an increased content of a WRI1 polypeptide, an increased content of a DGAT polypeptide, and a decreased content of a SDP1 polypeptide, each relative to a corresponding wild-type cell.

[0362] In another aspect, the present invention provides a Sorghum sp. or Zea mays cell, comprising an increased content of a WRI1 polypeptide, an increased content of a DGAT polypeptide, and an increased content of a LEC2 polypeptide, each relative to a corresponding wild-type cell.

[0363] In another aspect, the present invention provides a Sorghum sp. or Zea mays cell, comprising an increased content of a PDAT or DGAT polypeptide, a decreased content of a TGD polypeptide, preferably a TGD5 polypeptide, and a decreased content of a SDP1 polypeptide, each relative to a corresponding wild-type cell.

[0364] In another aspect, the present invention provides a Sorghum sp. or Zea mays cell, comprising a decreased content of a TAG lipase such as a SDP1 TAG lipase, a decreased content of a TGD polypeptide such as a TGD5 polypeptide, and optionally a decreased content of a TST polypeptide such as a TST1 polypeptide, each decrease being relative to a corresponding wild-type cell.

[0365] In an embodiment of the above aspects related to a cell of the invention, one or more or all of the following features apply:

[0366] (i) the cell is in a vegetative plant part which was harvested from a Sorghum sp. or Zea mays plant between the time of first flowering of the plant and first maturity of seed,

[0367] (ii) the cell is a Sorghum bicolor plant cell,

[0368] (iii) the cell is in a leaf or stem or a part thereof,

[0369] (iv) the cell comprises a total lipid content of about 8% or about 10% on a weight basis,

[0370] (v) the total fatty acid content of the cell comprises an oleic acid content which is increased by at least 2% or at least 3% relative to the oleic acid content of a corresponding wild-type cell,

[0371] (vi) the total fatty acid content of the cell comprises a palmitic acid content which is increased by at least 2% or at least 3% relative to the palmitic acid content of a corresponding wild-type cell,

[0372] (vii) the total fatty acid content of the cell comprises a α-linoleic acid (ALA) content which is decreased by at least 2% or at least 3% relative to the ALA content of a corresponding wild-type cell,

[0373] (viii) the cell comprises an increased soluble protein content relative to a corresponding wild-type cell,

[0374] (ix) the cell comprises an increased nitrogen content relative to a corresponding wild-type cell,

[0375] (x) the cell comprises a decreased carbon:nitrogen ratio relative to a corresponding wild-type cell,

[0376] (xi) the cell comprises an increased photosynthetic capacity relative to a corresponding wild-type cell,

[0377] (xii) the cell comprises a decreased starch and/or total dietary fibre (TDF) content relative to a corresponding wild-type cell,

[0378] (xiii) the cell comprises an increased carbon content relative to a corresponding wild-type cell,

[0379] (xiv) the cell comprises an increased transcription factor polypeptide content relative to a corresponding wild-type cell, wherein the transcription factor polypeptide is selected from the group consisting of Wrinkled 1 (WRI1), Leafy Cotyledon 1 (LEC1), LEC1-like, Leafy Cotyledon 2 (LEC2), BABY BOOM (BBM), FUS3, ABI3, ABI4, ABI5, Dof4 and Dof11, or the group consisting of MYB73, bZIP53, AGL15, MYB115, MYB118, TANMEI, WUS, GFR2a1, GFR2a2 and PHR1,

[0380] (xv) the cell comprises an increased fatty acid acyltransferase polypeptide content relative to a corresponding wild-type cell, wherein the acyltransferase is diacylglycerol acyltransferase (DGAT) and/or phospholipid: diacylglycerol acyltransferase (PDAT),

[0381] (xvi) the cell comprises a decreased TAG lipase polypeptide content relative to a corresponding wild-type cell,

[0382] (xvii) the cell comprises a decreased trigalactosyldiacylglycerol (TGD) polypeptide content relative to a corresponding wild-type cell,

[0383] (xviii) the cell comprises an increased content of an oil body coating (OBC) polypeptide or a lipid droplet associated polypeptide (LDAP) relative to a corresponding wild-type cell,

[0384] (xix) the cell comprises an increased total protein content relative to a corresponding wild-type cell,

[0385] (xx) the cell comprises an increased chlorophyll content relative to a corresponding wild-type cell,

[0386] (xxi) the cell comprises an increased energy content on a weight basis relative to a corresponding wild-type cell,

[0387] (xxii) the cell comprises an increased phospholipid and/or galactolipid content relative to a corresponding wild-type cell, preferably an increased MDGD content and/or an increased DGDG content, and

[0388] (xxiii) the ratio of the fatty acids esterified in the form of TAG to the fatty acids in the form of lipids other than TAG is between 20:1 and 1.5:1, or between 5:1 and 2:1, or about 4, about 3.5, about 3, or about 2.5,

[0389] (xxix) the TTQ is about 0.1, or about 0.2 or about 0.3, or about 0.4 or about 0.5, or about 0.6, or about 0.65, or about 0.7, or about 0.75, or about 0.8, or about 0.81, or about 0.82, or about 0.83, or about 0.84, or about 0.85, or about 8.6, or about 8.7, or about 8.8, or about 8.9, or about 0.9, or about 0.91, or about 0.92, or about 0.93, or about 0.94, or about 0.95.

[0390] In an embodiment of the above aspects, the vegetative plant parts or cell of the invention comprises one or both of

[0391] a) a first exogenous polynucleotide which encodes a transcription factor polypeptide that increases the expression of one or more glycolytic and/or fatty acid biosynthetic genes in the vegetative plant parts or cell, preferably a WRI1 polypeptide, and

[0392] b) a second exogenous polynucleotide which encodes a polypeptide involved in the biosynthesis of one or more non-polar lipids, preferably a DGAT and/or a PDAT, and in each case any one or two or three or all four of

[0393] c) a first genetic modification which down-regulates endogenous production and/or activity of a polypeptide involved in the catabolism of triacylglycerols (TAG) in the vegetative plant parts or cell, preferably an SDP1 TAG lipase, when compared to a corresponding vegetative plant part or cell lacking the genetic modification,

[0394] d) a third exogenous polynucleotide which encodes a polypeptide which increases the export of fatty acids out of plastids of the vegetative plant parts or cell when compared to a corresponding vegetative plant part or cell lacking the third exogenous polynucleotide, preferably an acyl-ACP thioesterase polypeptide,

[0395] e) a fourth exogenous polynucleotide which encodes a second transcription factor polypeptide that increases the expression of one or more glycolytic and/or fatty acid biosynthetic genes in the vegetative plant parts or cell, preferably a LEC2 polypeptide, and

[0396] f) a second genetic modification which down-regulates endogenous production and/or activity of a polypeptide involved in importing fatty acids into plastids of the vegetative plant parts or cell, preferably a TGD polypeptide, when compared to a corresponding vegetative plant part or cell lacking the second genetic modification, wherein each exogenous polynucleotide is operably linked to a promoter which is capable of directing expression of the polynucleotide in the vegetative plant parts or cell.

[0397] In an embodiment, the vegetative plant parts or cell further comprises one or both of

[0398] a) a fifth exogenous polynucleotide which encodes an oil body coating (OBC) polypeptide or a lipid droplet associated protein (LDAP), and

[0399] b) a third genetic modification which down-regulates endogenous production and/or activity of a polypeptide involved in diacylglycerol (DAG) production in the plastid when compared to a corresponding vegetative plant part or cell lacking the third genetic modification.

[0400] In an alternate embodiment, the vegetative plant parts or cell comprises

[0401] a) a first exogenous polynucleotide which encodes a transcription factor polypeptide that increases the expression of one or more glycolytic and/or fatty acid biosynthetic genes in the vegetative plant parts or cell, preferably a WRI1 polypeptide,

[0402] b) a second exogenous polynucleotide which encodes a polypeptide involved in the biosynthesis of one or more non-polar lipids, preferably a DGAT and/or a PDAT, and any one or two or all three of

[0403] c) a first genetic modification which down-regulates endogenous production and/or activity of a polypeptide involved in the catabolism of triacylglycerols (TAG) in the vegetative plant parts or cell, preferably an SDP1 TAG lipase, when compared to a corresponding vegetative plant part or cell lacking the genetic modification,

[0404] d) a third exogenous polynucleotide which encodes a polypeptide which increases the export of fatty acids out of plastids of the vegetative plant parts or cell when compared to a corresponding vegetative plant part or cell lacking the third exogenous polynucleotide, preferably a acyl-ACP thioesterase polypeptide, and

[0405] e) a fourth exogenous polynucleotide which encodes a second transcription factor polypeptide that increases the expression of one or more glycolytic and/or fatty acid biosynthetic genes in the vegetative plant parts or cell, preferably a LEC2 polypeptide,

wherein each exogenous polynucleotide is operably linked to a promoter which is capable of directing expression of the polynucleotide in the vegetative plant parts or cell.

[0406] In an embodiment, the vegetative plant parts or cell further comprises one or more or all of

[0407] a) a fifth exogenous polynucleotide which encodes an oil body coating (OBC) polypeptide or a lipid droplet associated protein (LDAP),

[0408] b) a second genetic modification which down-regulates endogenous production and/or activity of a polypeptide involved in importing fatty acids into plastids of the vegetative plant parts or cell when compared to a corresponding vegetative plant part or cell lacking the second genetic modification, and

[0409] c) a third genetic modification which down-regulates endogenous production and/or activity of a polypeptide involved in diacylglycerol (DAG) production in the plastid when compared to a corresponding vegetative plant part or cell lacking the third genetic modification.

[0410] In a further embodiment, the vegetative plant parts or cell comprises a first exogenous polynucleotide which encodes a WRI1 polypeptide, a second exogenous polynucleotide which encodes a DGAT polypeptide, and a decreased content of a TAG lipase polypeptide and/or a decreased content of a TGD polypeptide relative to a corresponding wild-type vegetative plant part or cell, wherein each exogenous polynucleotide is operably linked to a promoter which is capable of directing expression of the polynucleotide in the vegetative plant parts or cell.

[0411] In another embodiment, the vegetative plant parts or cell comprises an exogenous polynucleotide which encodes a PDAT or DGAT polypeptide, an increased content of the PDAT or DGAT polypeptide, a decreased content of a TGD polypeptide and a decreased content of a TAG lipase polypeptide, each relative to a corresponding wild-type vegetative plant part or cell, wherein the exogenous polynucleotide is operably linked to a promoter which is capable of directing expression of the polynucleotide in the vegetative plant parts or cell.

[0412] In a further embodiment, the vegetative plant parts or cell comprises a decreased content of a TAG lipase such as a SDP1 TAG lipase, a decreased content of a TGD polypeptide such as a TGD5 polypeptide, and optionally a decreased content of a TST polypeptide such as a TST1 polypeptide, each decrease being relative to a corresponding wild-type part or cell.

[0413] In a further embodiment, the cell is from or in a vegetative part of a plant, preferably, a Sorghum sp. or Zea mays plant.

[0414] In a further embodiment, one or more or all of the following features apply;

[0415] i) the vegetative plant parts or cell has an increased synthesis of total fatty acids relative to a corresponding vegetative plant part or cell lacking the first exogenous polynucleotide, or a decreased catabolism of total fatty acids relative to a corresponding vegetative plant part or cell lacking the first exogenous polynucleotide, or both, such that it has an increased level of total fatty acids relative to a corresponding vegetative plant part or cell lacking the first exogenous polynucleotide,

[0416] ii) the vegetative plant parts or cell has an increased expression and/or activity of a fatty acyl acyltransferase which catalyses the synthesis of TAG, DAG or MAG, preferably TAG, relative to a corresponding vegetative plant part or cell having the first exogenous polynucleotide and lacking the exogenous polynucleotide which encodes a polypeptide involved in the biosynthesis of one or more non-polar lipids,

[0417] iii) the vegetative plant parts or cell has a decreased production of lysophosphatidic acid (LPA) from acyl-ACP and G3P in its plastids relative to a corresponding vegetative plant part or cell having the first exogenous polynucleotide and lacking the genetic modification which down-regulates endogenous production and/or activity of a polypeptide involved in diacylglycerol (DAG) production in the plastid in the vegetative plant parts or cell,

[0418] iv) the vegetative plant parts or cell has an altered ratio of C16:3 to C18:3 fatty acids in its total fatty acid content and/or its galactolipid content relative to a corresponding vegetative plant part or cell lacking the exogenous polynucleotide(s) and/or genetic modification(s), preferably a decreased ratio,

[0419] v) the cell is in a vegetative part of a plant and comprises a total non-polar lipid content of at least about 8%, at least about 10%, at least about 11%, at least about 12%, at least about 15%, at least about 20%, at least about 25%, at least about 30%, at least about 35%, at least about 40%, at least about 45%, at least about 50%, at least about 55%, at least about 60%, at least about 65%, at least about 70%, between about 6% and about 20%, between 8% and 75%, between 10% and 75%, between 11% and 75%, between about 15% and 75%, between about 20% and 75%, between about 30% and 75%, between about 40% and 75%, between about 50% and 75%, between about 60% and 75%, or between about 25% and 50% (w/w dry weight),

[0420] vi) the cell is in a vegetative part of a plant and comprises a TAG content of at least about 8%, at least about 10%, at least about 11%, at least about 12%, at least about 15%, at least about 20%, at least about 25%, at least about 30%, at least about 35%, at least about 40%, at least about 45%, at least about 50%, at least about 55%, at least about 60%, at least about 65%, at least about 70%, between about 6% and about 20%, between 8% and 75%, between 10% and 75%, between 11% and 75%, between about 15% and 75%, between about 20% and 75%, between about 30% and 75%, between about 40% and 75%, between about 50% and 75%, between about 60% and 75%, or between about 25% and 50% (w/w dry weight),

[0421] vii) the transcription factor polypeptide is selected from the group consisting of Wrinkled 1 (WRI1), Leafy Cotyledon 1 (LEC1), LEC1-like, Leafy Cotyledon 2 (LEC2), BABY BOOM (BBM), FUS3, ABI3, ABI4, ABI5, Dof4 and Dof11,

[0422] viii) oleic acid comprises at least 20% (mol %), at least 22% (mol %), at least 30% (mol %), at least 40% (mol %), at least 50% (mol %), or at least 60% (mol %), preferably about 65% (mol %) or between 20% and about 65% of the total fatty acid content in the vegetative plant parts or cell,

[0423] ix) non-polar lipid in the vegetative plant parts or cell comprises one or more polyunsaturated fatty acids selected from eicosadienoic acid (EDA), arachidonic acid (ARA), stearidonic acid (SDA), eicosatrienoic acid (ETE), eicosatetraenoic acid (ETA), eicosapentaenoic acid (EPA), docosapentaenoic acid (DPA), docosahexaenoic acid (DHA), or a combination of two of more thereof,

[0424] x) one or more or all of the promoters are selected from a constitutive promoter such as a ubiquitin gene promoter or an actin gene promoter, a tissue-specific promoter such as a leaf and/or stem specific promoter, a developmentally regulated promoter such as a senescence-specific promoter such as a SAG12 promoter, an inducible promoter, or a circadian-rhythm regulated promoter,

[0425] xi) the vegetative plant parts or cell comprises a total fatty acid content whose oleic acid level is increased by at least 2% or at least 3% relative to a corresponding vegetative plant part or cell lacking the exogenous polynucleotide(s) and/or genetic modification(s), and/or whose α-linolenic acid (ALA) level is decreased by at least 2% or at least 3% relative to a corresponding vegetative plant part or cell lacking the exogenous polynucleotide(s) and/or genetic modification(s),

[0426] xii) non-polar lipid in the vegetative plant parts or cell comprises a modified level of total sterols, preferably free (non-esterified) sterols, steroyl esters, steroyl glycosides, relative to the non-polar lipid in a corresponding vegetative plant part or cell lacking the exogenous polynucleotide(s) and/or genetic modification(s),

[0427] xiii) the level of one or more non-polar lipid(s) and/or the total non-polar lipid content of the vegetative plant parts or cell is at least 2% greater on a weight basis than in a corresponding vegetative plant parts or cell which comprises exogenous polynucleotides encoding an Arabidposis thaliana WRI1 (SEQ ID NO:21) and an Arabidopsis thaliana DGAT1 (SEQ ID NO:1).

[0428] In a further embodiment, one or more or all of the following features apply where relevant;

[0429] i) the polypeptide involved in the biosynthesis of one or more non-polar lipids is a fatty acyl acyltransferase involved in the biosynthesis of TAG, DAG or monoacylglycerol (MAG) in the cell, such as a DGAT, PDAT, LPAAT, GPAT or MGAT, preferably a DGAT or a PDAT, or is a PDCT or a CPT polypeptide,

[0430] ii) the polypeptide involved in the catabolism of triacylglycerols (TAG) in the vegetative plant parts or cell is an SDP1 lipase, a Cgi58 polypeptide, an acyl-CoA oxidase such as ACX1 or ACX2, or a polypeptide involved in β-oxidation of fatty acids in the vegetative plant parts or cell such as a PXA1 peroxisomal ATP-binding cassette transporter, preferably an SDP1 lipase,

[0431] iii) the oil body coating (OBC) polypeptide is oleosin, such as a polyoleosin or a caleosin, or a lipid droplet associated protein (LDAP),

[0432] iv) the polypeptide which increases the export of fatty acids out of plastids of the vegetative plant parts or cell is a C16 or C18 fatty acid thioesterase such as a FATA polypeptide or a FATB polypeptide, a fatty acid transporter such as an ABCA9 polypeptide or a long-chain acyl-CoA synthetase (LACS),

[0433] v) the polypeptide involved in importing fatty acids into plastids of the vegetative plant parts or cell is a fatty acid transporter, or subunit or regulatory polypeptide thereof, preferably a TGD polypeptide, more preferably a TGD5 polypeptide, and

[0434] vi) the polypeptide involved in diacylglycerol (DAG) production in the plastid is a plastidial GPAT, a plastidial LPAAT or a plastidial PAP.

[0435] In an embodiment, the activity of PDCT or CPT is increased in the vegetative plant part or cell of the invention. Alternatively, the activity of PDCT or CPT is decreased, for example by mutation in the endogenous gene encoding the enzyme or by downregulation of the gene by an RNA molecule which reduces its expression.

[0436] In a further embodiment of the above aspects, the cell of the invention is from or in a plant leaf or stem, before the plant flowers, and the cell comprises a total non-polar fatty acid content of at least about 8%, at least about 10%, at least about 11%, between 8% and 15%, or between 9% and 12% on a weight basis, preferably between about 8% and about 20%.

[0437] In a further embodiment, each genetic modification is independently a mutation of an endogenous gene which partially or completely inactivates the gene, such as a point mutation, an insertion or a deletion, or the genetic modification is an exogenous polynucleotide encoding an RNA molecule which reduces expression of the endogenous gene, wherein the exogenous polynucleotide is operably linked to a promoter which is capable of directing expression of the polynucleotide in the vegetative plant parts or cell.

[0438] In a further aspect, the present invention provides a Sorghum sp. or Zea mays plant or part thereof, the plant comprising a vegetative plant part whose total fatty acid (TFA) content comprises fatty acids esterified in the form of triacylglycerols (TAG) and fatty acids in the form of lipids other than TAG, wherein the vegetative plant part comprises a TFA content of about 5% (w/w dry weight), preferably between about 6% and about 20%. In an embodiment, the plant part is a seed or seeds obtained from the plant, or a seed or seeds which when sown give rise to such a plant.

[0439] In another aspect, the present invention provides a Sorghum sp. or Zea mays plant or part thereof, the plant comprising a vegetative plant part whose total fatty acid content comprises fatty acids esterified in the form of triacylglycerols (TAG) and fatty acids in the form of lipids other than TAG, wherein the vegetative plant part comprises a total TAG content of about 6% (w/w dry weight), preferably between about 6% and about 20%, and preferably has a ratio of the fatty acids esterified in the form of TAG to the fatty acids in the form of lipids other than TAG which is between 20:1 and 1.5:1 or between 5:1 and 2:1.

[0440] In another aspect, the present invention provides a plant, preferably a Sorghum sp. or Zea mays plant, or part thereof comprising a vegetative plant part whose total fatty acid (TFA) content comprises fatty acids esterified in the form of triacylglycerols (TAG) and fatty acids in the form of lipids other than TAG, wherein the vegetative plant part comprises a TFA content of about 5% (w/w dry weight), preferably between 6% and 20%, and preferably has a TAG/TFA Quotient (TTQ) of between 0.01 and 0.60, or between 0.60 and 0.84, or between 0.84 and 0.95.

[0441] In another aspect, the present invention provides a plant, preferably a Sorghum sp. or Zea mays plant, or part thereof, the plant comprising a vegetative plant part comprising an increased content of a WRI1 polypeptide, an increased content of a DGAT polypeptide, and a decreased content of a SDP1 polypeptide, each relative to a corresponding wild-type vegetative plant part.

[0442] In another aspect, the present invention provides a plant, preferably a Sorghum sp. or Zea mays plant, or part thereof, the plant comprising a vegetative plant part comprising an increased content of a WRI1 polypeptide, an increased content of a DGAT polypeptide, and an increased content of a LEC2 polypeptide, each relative to a corresponding wild-type vegetative plant part.

[0443] In another aspect, the present invention provides a plant, preferably a Sorghum sp. or Zea mays plant, or part thereof, the plant comprising a vegetative plant part comprising an increased content of a PDAT or DGAT polypeptide, a decreased content of a TGD polypeptide, preferably a TGD5 polypeptide, and a decreased content of a SDP1 polypeptide, each relative to a corresponding wild-type vegetative plant part.

[0444] In another aspect, the present invention provides a plant, preferably a Sorghum sp. or Zea mays plant, or part thereof, the plant comprising a vegetative plant part comprising a decreased content of a TAG lipase such as a SDP1 TAG lipase, a decreased content of a TGD polypeptide such as a TGD5 polypeptide, and optionally a decreased content of a TST polypeptide such as a TST1 polypeptide, each decrease being relative to a corresponding wild-type vegetative plant part.

[0445] In an embodiment of the above aspects, the plant of the invention is phenotypically normal. In an embodiment, the plant of the invention has an above-ground biomass which is at least 80% relative to a corresponding wild-type plant. Preferably, the plant has a plant height which is at least 80% relative to the corresponding wild-type plant, and is male and female fertile. In an embodiment, the plant is a hybrid Zea mays plant.

[0446] In an embodiment of the above aspects, the vegetative plant part of the plant of the invention has a total fatty acid content characterised by a TTQ of between 0.01 and 0.6. In an embodiment, the vegetative plant part has a TTQ of between 0.01 and 0.55, or between 0.01 and 0.5, or bout 0.1, or about 0.2 or about 0.3, or about 0.4 or about 0.5. Preferably, the TTQ is between 0.60 and 0.84 or between 0.84 and 0.95.

[0447] In a preferred embodiment of the above aspects, the cell or vegetative plant part of the invention comprises one or more exogenous polynucleotides or genetic modifications which each, or in combination, increase the TTQ of the total fatty acid content of the cell or vegetative plant part relative to a corresponding cell or vegetative plant part which lacks the exogenous polynucleotide or genetic modification, wherein the exogenous polynucleotide or genetic modification provides for (i) a decreased TAG lipase polypeptide content, preferably a decreased SDP1 polypeptide content, (ii) a decreased TGD polypeptide content, preferably a decreased TGD5 polypeptide content, (iii) an increased content of an OBC polypeptide or a LDAP, (iv) an increased content of a polypeptide which increases the export of fatty acids out of plastids, preferably an acyl-ACP thioesterase, (v) a decreased TST polypeptide content, preferably a decreased TST1 polypeptide content, (vi) a modified level of a PDCT polypeptide, and (vii) a modified level of a CPT polypeptide. More preferably, the TTQ is between 0.60 and 0.84 or between 0.84 and 0.95, and/or the cell or vegetative plant part comprises a TAG content of about 6% (w/w dry weight), preferably between about 6% and about 20%.

[0448] In an embodiment, the plant or part thereof comprises one or both of

[0449] a) a first exogenous polynucleotide which encodes a transcription factor polypeptide that increases the expression of one or more glycolytic and/or fatty acid biosynthetic genes in the plant or part thereof, preferably a WRI1 polypeptide, and

[0450] b) a second exogenous polynucleotide which encodes a polypeptide involved in the biosynthesis of one or more non-polar lipids, preferably a DGAT and/or a PDAT, and in each case any one or two or three or all four of

[0451] c) a genetic modification which down-regulates endogenous production and/or activity of a polypeptide involved in the catabolism of triacylglycerols (TAG) in the plant or part thereof when compared to a corresponding plant or part thereof lacking the genetic modification, preferably an SDP1 TAG lipase,

[0452] d) a third exogenous polynucleotide which encodes a polypeptide which increases the export of fatty acids out of plastids of a cell in the plant or part thereof, preferably an acyl-ACP thioesterase, when compared to a corresponding cell lacking the third exogenous polynucleotide,

[0453] e) a fourth exogenous polynucleotide which encodes a second transcription factor polypeptide that increases the expression of one or more glycolytic and/or fatty acid biosynthetic genes in a cell in the plant or part thereof, preferably a LEC2 polypeptide, and

[0454] f) a second genetic modification which down-regulates endogenous production and/or activity of a polypeptide involved in importing fatty acids into plastids of the cell when compared to a corresponding cell lacking the second genetic modification, wherein each exogenous polynucleotide is operably linked to a promoter which is capable of directing expression of the polynucleotide in the plant or part thereof.

[0455] In an embodiment, the plant or part thereof further comprises one or both of

[0456] a) a fifth exogenous polynucleotide which encodes an oil body coating (OBC) polypeptide or a lipid droplet associated protein (LDAP), and

[0457] b) a third genetic modification which down-regulates endogenous production and/or activity of a polypeptide involved in diacylglycerol (DAG) production in plastids when compared to a corresponding plant or part thereof lacking the third genetic modification.

[0458] Alternately, in a further embodiment, the plant or part thereof comprises

[0459] a) a first exogenous polynucleotide which encodes a transcription factor polypeptide that increases the expression of one or more glycolytic and/or fatty acid biosynthetic genes in the plant or part thereof, preferably a WRI1 polypeptide,

[0460] b) a second exogenous polynucleotide which encodes a polypeptide involved in the biosynthesis of one or more non-polar lipids, preferably a DGAT polypeptide and/or a PDAT polypeptide, and any one or two or all three of

[0461] c) a genetic modification which down-regulates endogenous production and/or activity of a polypeptide involved in the catabolism of triacylglycerols (TAG) in the plant or part thereof, preferably an SDP1 TAG lipase, when compared to a corresponding plant or part thereof lacking the genetic modification,

[0462] d) a third exogenous polynucleotide which encodes a polypeptide which increases the export of fatty acids out of plastids of a cell in the plant when compared to a corresponding cell lacking the third exogenous polynucleotide, preferably an acyl-ACP thioesterase, and

[0463] e) a fourth exogenous polynucleotide which encodes a second transcription factor polypeptide that increases the expression of one or more glycolytic and/or fatty acid biosynthetic genes in a cell in the plant or part thereof, preferably a LEC2 polypeptide,

wherein each exogenous polynucleotide is operably linked to a promoter which is capable of directing expression of the polynucleotide in the plant or part thereof.

[0464] In an embodiment, the plant or part thereof further comprises one or more or all of

[0465] a) a fifth exogenous polynucleotide which encodes an oil body coating (OBC) polypeptide,

[0466] b) a second genetic modification which down-regulates endogenous production and/or activity of a polypeptide involved in importing fatty acids into plastids of the plant when compared to a corresponding plant lacking the second genetic modification, and

[0467] c) a third genetic modification which down-regulates endogenous production and/or activity of a polypeptide involved in diacylglycerol (DAG) production in the plastid when compared to a corresponding plant lacking the third genetic modification.

[0468] In a further embodiment, the plant part is a vegetative plant part and one or more or all of the promoters are expressed at a higher level in the vegetative plant part relative to seed of the plant. For example, a preferred promoter is a ubiquitin gene promoter or an SSU promoter. Alternatively, one or more or all of the promoters are other than an SSU promoter.

[0469] In a further embodiment, the plant or part thereof is further characterised by one or more features as described in the context of the Sorghum sp. or Zea mays cell of the invention, or of the processes of the above aspects.

[0470] In an embodiment of the above aspects, a Sorghum sp. or Zea mays plant of the invention, or a plant or part thereof used in a method of the invention or otherwise described herein, has been grown under a photoperiod of at least 13 hours per day for a period of at least 1 week, or at least 2 weeks or at least 3 weeks or at least 4 weeks, preferably up to when the plant is harvested to obtain vegetative parts from the plant. Under such conditions, the above-ground biomass of the plant is preferable at least 80% relative to a corresponding wild-type plant. Seed of the plant may be harvested from the plant after growth under such conditions.

[0471] In another embodiment of the above aspects, a Sorghum sp. or Zea mays plant of the invention, or a plant or part thereof used in a method of the invention or otherwise defined herein, was/is grown in a CO₂ concentration of at least 400 ppm.

[0472] In a further embodiment, a Sorghum sp. or Zea mays plant of the invention, or a plant or part thereof used in a method of the invention or otherwise described herein comprises one or more exogenous polynucleotides encoding one or more proteins which increase the total protein content in the vegetative plant part.

[0473] In another aspect, the present invention provides a population of at least about 1000 plants, each being a plant according to the invention, growing in a field, or a collection of at least about 1000 vegetative plant parts, each being a vegetative plant part according to the invention, wherein the vegetative plant parts have been harvested from plants growing in a field. Preferably the plants were grown under the photoperiod and/or CO₂ conditions described above.

[0474] In another aspect, the present invention provides seed of, or obtained from, a plant according to the invention, or which when sown give rise to plants of the invention. Alternatively, the seed may have been treated so it is no longer able to germinate, and/or be ground, milled, polished, cracked or heat treated.

[0475] In a further aspect, the present invention provides a process for selecting a plant or part thereof of the invention, preferably a Sorghum sp. or Zea mays plant or a part thereof, with a desired phenotype, the process comprising

[0476] i) obtaining a plurality of candidate plants, or parts thereof, which each comprise one or both of
[0477] a) a first exogenous polynucleotide which encodes a transcription factor polypeptide that increases the expression of one or more glycolytic and/or fatty acid biosynthetic genes in the plant or part thereof, preferably a WRI1 polypeptide, and
[0478] b) a second exogenous polynucleotide which encodes a polypeptide involved in the biosynthesis of one or more non-polar lipids, preferably a DGAT polypeptide and/or a PDAT polypeptide, and in each case any one or two or three or all four of
[0479] c) a genetic modification which down-regulates endogenous production and/or activity of a polypeptide involved in the catabolism of triacylglycerols (TAG) in the plant or part thereof, preferably a SDP1 TAG lipase, when compared to a corresponding plant or part thereof lacking the genetic modification,
[0480] d) a third exogenous polynucleotide which encodes a polypeptide which increases the export of fatty acids out of plastids of a cell in the plant or part thereof when compared to a corresponding cell lacking the third exogenous polynucleotide, preferably an acyl-ACP thioesterase,
[0481] e) a fourth exogenous polynucleotide which encodes a second transcription factor polypeptide that increases the expression of one or more glycolytic and/or fatty acid biosynthetic genes in a cell in the plant or part thereof, preferably a LEC2 polypeptide, and
[0482] f) a second genetic modification which down-regulates endogenous production and/or activity of a polypeptide involved in importing fatty acids into plastids of the cell when compared to a corresponding cell lacking the second genetic modification,
   wherein each exogenous polynucleotide is operably linked to a promoter which is capable of directing expression of the polynucleotide in the plant;

[0483] ii) analysing lipid in the plurality of parts, or at least a part of each plant in the plurality of candidate plants, from step i), and

[0484] iii) selecting a plant, or part thereof, which comprises a vegetative plant part whose total fatty acid (TFA) content comprises fatty acids esterified in the form of triacylglycerols (TAG) and fatty acids in the form of lipids other than TAG, and which has a vegetative plant part which comprises a TFA content of about 5% (w/w dry weight), preferably between about 6% and about 20%.

[0485] In an embodiment, a plant is selected, or a part thereof, which comprises a vegetative plant part whose total fatty acid content is characterised by having a TTQ of between 0.01 and 0.6. In an embodiment, a plant is selected, or part thereof, wherein the plant comprises a vegetative plant part having a TTQ of between 0.01 and 0.55, or between 0.01 and 0.5, or bout 0.1, or about 0.2 or about 0.3, or about 0.4 or about 0.5. Preferably, the TTQ is between 0.60 and 0.84 or between 0.84 and 0.95.

[0486] In an embodiment, the above process further comprises a step of calculating the TTQ for the candidate plants or parts, after step ii).

[0487] In another aspect, the present invention provides a process for selecting a Sorghum sp. or Zea mays plant or a part thereof with a desired phenotype, the process comprising

[0488] i) obtaining a plurality of candidate plants, or parts thereof, which each comprise
[0489] a) a first exogenous polynucleotide which encodes a transcription factor polypeptide that increases the expression of one or more glycolytic and/or fatty acid biosynthetic genes in the plant or part thereof, preferably a WRI1 polypeptide,
[0490] b) a second exogenous polynucleotide which encodes a polypeptide involved in the biosynthesis of one or more non-polar lipids, preferably a DGAT polypeptide and/or a PDAT polypeptide, and any one or two or all three of
[0491] c) a genetic modification which down-regulates endogenous production and/or activity of a polypeptide involved in the catabolism of triacylglycerols (TAG) in the plant or part thereof, preferably an SDP1 TAG lipase, when compared to a corresponding plant or part thereof lacking the genetic modification,
[0492] d) a third exogenous polynucleotide which encodes a polypeptide which increases the export of fatty acids out of plastids of a cell in the plant or part thereof when compared to a corresponding cell lacking the third exogenous polynucleotide, preferably an acyl-ACP thioesterase, and
[0493] e) a fourth exogenous polynucleotide which encodes a second transcription factor polypeptide that increases the expression of one or more glycolytic and/or fatty acid biosynthetic genes in a cell in the plant or part thereof, preferably a LEC2 polypeptide,
   wherein each exogenous polynucleotide is operably linked to a promoter which is capable of directing expression of the polynucleotide in the plant or part thereof;

[0494] ii) analysing lipid in the plurality of parts, or at least a part of each plant in the plurality of candidate plants, from step i),

[0495] iii) selecting a plant or part thereof wherein the plant comprises a vegetative plant part whose total fatty acid content comprises fatty acids esterified in the form of triacylglycerols (TAG) and fatty acids in the form of lipids other than TAG, and which has a vegetative plant part which comprises a total TAG content of about 6% (w/w dry weight), preferably between about 6% and about 20%, and preferably has a ratio of the fatty acids esterified in the form of TAG to the fatty acids in the form of lipids other than TAG which is between 20:1 and 1.5:1 or between 5:1 and 2:1.

[0496] In another aspect, the present invention provides a process for selecting a plant, preferably a Sorghum sp. or Zea mays plant, or a part thereof having an increased TTQ in its total fatty acid content, the process comprising

[0497] i) obtaining a plurality of candidate plants, or parts thereof, which each comprise one or more genetic modifications which provides for (a) a decreased TAG lipase polypeptide content, preferably a decreased SDP1 TAG lipase content, (b) a decreased TGD polypeptide content, preferably a decreased TGD5 polypeptide content, (c) an increased content of an OBC polypeptide or a LDAP, (d) an increased content of a polypeptide which increases the export of fatty acids out of plastids, preferably an acyl-ACP thioesterase, (e) a decreased TST polypeptide content, preferably a decreased TST1 polypeptide content, (f) a modified level of a PDCT polypeptide, and (g) a modified level of a CPT polypeptide,

[0498] ii) analysing lipid in the plurality of parts, or at least a part of each plant in the plurality of candidate plants, from step i),

[0499] iii) selecting a plant or part thereof which comprises an increased TTQ in its total fatty acid content relative to a corresponding plant or plant part which lacks the genetic modifications. That is, each of the one or more genetic modifications, when expressed in the candidate plants or part thereof, results in a decreased, increased or modified polypeptide content according to (a) to (g). In the case of a decreased polypeptide content, each genetic modification is, independently, a mutation of an endogenous gene encoding the polypeptide which partially or completely inactivates the gene, such as a point mutation, an insertion, or preferably a deletion, or the genetic modification comprises the integration into the genome of an exogenous polynucleotide which encodes an RNA molecule which inhibits expression of the endogenous gene, wherein the exogenous polynucleotide is operably linked to a promoter which is capable of directing expression of the polynucleotide in the plant or part thereof.

[0500] In an embodiment, the process comprises a step of calculating the TTQ for the candidate plants or parts, after step ii). The selected plant may be selected on the basis of the TTQ and/or of its TAG or TFA content. In a preferred embodiment, the selected plant comprises a vegetative plant part which has a TTQ which is between 0.60 and 0.84 or between 0.84 and 0.95, and/or the vegetative plant part comprises a TAG content of about 6% (w/w dry weight), preferably between about 6% and about 20%.

[0501] In a more preferred embodiment, the plurality of candidate plants, or parts thereof, each comprise a first exogenous polynucleotide which encodes a transcription factor polypeptide that increases the expression of one or more glycolytic and/or fatty acid biosynthetic genes in the plant or part thereof, preferably a WRI1 polypeptide, and a second exogenous polynucleotide which encodes a polypeptide involved in the biosynthesis of one or more non-polar lipids, preferably a DGAT polypeptide and/or a PDAT polypeptide. That is, the genetic modification which results in the decreased, increased or modified polypeptide content according to (a) to (g) is additional to the first and second exogenous polynucleotides, and increases the TTQ relative to a corresponding plant or vegetative part which has the first and second exogenous polynucleotides but lacks the genetic modification.

[0502] In an embodiment, the plant, or part thereof which is selected is further characterised by one or more features as defined in the context of a plant of the invention, the Sorghum sp. or Zea mays plant of the invention, or of the processes of the above aspects.

[0503] The process for selecting a plant of the invention can also be used to select for a plant which has an increased TTQ or TAG content in a stem of the plant, which preferably is accompanied by an increased TTQ or TAG content in leaves of the plant, although the TTQ and TAG content in leaves of the plant may not be increased at all or as much as in the stem.

[0504] In another aspect, the present invention provides a process for obtaining a cell or plant according to the invention, preferably a Sorghum sp. or Zea mays cell or plant, the process comprising the steps of introducing into a cell or plant, preferably a Sorghum sp. or Zea mays cell or plant, at least one exogenous polynucleotide and/or at least one genetic modification as defined above.

[0505] In an embodiment, the process comprises one or more or all steps of

[0506] i) expressing the exogenous polynucleotide(s) and/or genetic modifications in the cell or plant or a progeny cell or plant therefrom,

[0507] ii) analysing the lipid content of the cell or plant or progeny cell or plant, and

[0508] iii) selecting or identifying a cell or plant according to the invention.

The obtained cell may be in a Sorghum or Zea mays plant or preferably in a vegetative part thereof. In an embodiment, the exogenous polynucleotide(s) and/or genetic modifications provide for a modified feature which comprises a decreased, increased, or modified polypeptide content according to (a) to (g) above. In an embodiment, the process comprises a step of calculating the TTQ for the candidate plants or parts, after step ii). In a preferred embodiment, the cell or plant is selected or identified on the basis of its TTQ and/or its TAG content, more preferably a TTQ which is between 0.60 and 0.84 or between 0.84 and 0.95, and/or the vegetative plant part comprises a TAG content of about 6% (w/w dry weight), preferably between about 6% and about 20%.

[0509] In another aspect, the present invention provides a method of producing a plant, preferably a Sorghum sp. or Zea mays plant, which has integrated into its genome a set of exogenous polynucleotides and/or genetic modifications as defined herein, the method comprising the steps of

[0510] i) crossing two parental plants, wherein one plant comprises at least one of the exogenous polynucleotides and/or at least one genetic modification as defined above, and the other plant comprises at least one of the exogenous polynucleotides and/or at least one genetic modification as defined above, and wherein between them the two parental plants comprise a set of exogenous polynucleotides and/or genetic modifications as defined above,

[0511] ii) screening one or more progeny plants from the cross for the presence or absence of the set of exogenous polynucleotides and/or genetic modifications as defined above, and

[0512] iii) selecting a progeny plant which comprise the set of exogenous polynucleotides and/or genetic modifications as defined above, thereby producing the plant.

[0513] In an embodiment, the plant, or part thereof which is produced is further characterised by one or more features as described in the context of a cell or plant of the invention, preferably a Sorghum sp. or Zea mays cell or plant, or of the processes of the above aspects.

[0514] In another aspect, the present invention provides a process for producing an oil product, the process comprising the steps of

[0515] (i) treating, in a reactor, a composition comprising
[0516] (a) vegetative plant parts, preferably Sorghum sp. or Zea mays vegetative plant parts whose total fatty acid, (TFA) content comprises fatty acids esterified in the form of triacylglycerols (TAG) and fatty acids in the form of lipids other than TAG, wherein the vegetative plant part comprises a TFA content of about 5% (w/w dry weight), preferably at least 10%,
[0517] (b) a solvent which comprises water, an alcohol, or both, and
[0518] (c) optionally a catalyst, wherein the treatment comprises heating the composition at a temperature between about 50° C. and about 450° C. and at a pressure between 5 and 350 bar for between 1 and 120 minutes in an oxidative, reductive or inert environment,

[0519] (ii) recovering oil product from the reactor at a yield of at least 35% by weight relative to the dry weight of the vegetative plant parts, thereby producing the oil product.

[0520] In an embodiment, the vegetative plant parts have a TTQ of between 0.01 and 0.6. In an embodiment, the vegetative plant parts have a TTQ of between 0.01 and 0.55, or between 0.01 and 0.5, or bout 0.1, or about 0.2 or about 0.3, or about 0.4 or about 0.5. Preferably, the TTQ is between 0.60 and 0.84 or between 0.84 and 0.95.

[0521] In another aspect, the present invention provides a process for producing an oil product, the process comprising the steps of

[0522] (i) treating, in a reactor, a composition comprising
[0523] (a) vegetative plant parts, preferably Sorghum sp. or Zea mays vegetative plant parts whose total fatty acid content comprises fatty acids esterified in the form of triacylglycerols (TAG) and fatty acids in the form of lipids other than TAG, wherein the vegetative plant part comprises a total TAG content of about 6% (w/w dry weight) and preferably has a ratio of the fatty acids esterified in the form of TAG to the fatty acids in the form of lipids other than TAG which is between 20:1 and 1.5:1 or between 5:1 and 2:1,
[0524] (b) a solvent which comprises water, an alcohol, or both, and
[0525] (c) optionally a catalyst,
   wherein the treatment comprises heating the composition at a temperature between about 50° C. and about 450° C. and at a pressure between 5 and 350 bar for between 1 and 120 minutes in an oxidative, reductive or inert environment,

[0526] (ii) recovering oil product from the reactor at a yield of at least 35% by weight relative to the dry weight of the vegetative plant parts, thereby producing the oil product.

[0527] In an embodiment of the two above aspects, one or more or all of the following apply:

[0528] (i) the vegetative plant parts have a dry weight of at least 1 kg,

[0529] (ii) the vegetative plant parts have a TFA content and/or a total non-polar lipid content of at least 10%, at least 15%, at least 20%, about 25%, about 30%, about 35%, or between 30% and 75% on a dry weight basis,

[0530] (iii) the composition has a solids concentration between 5% and 90%,

[0531] (iv) the catalysts comprises NaOH or KOH or both, preferably at a concentration of 0.1M to 2M,

[0532] (v) the treatment time is between 1 and 60 minutes, preferably between 10 and 60 minutes, more preferably between 15 and 30 minutes,

[0533] (vi) if the solvent is water the process produces a yield of the oil product between a minimum of 36%, 37%, 38%, 39% or 40% and a maximum of 55% or 60% by weight relative to the dry weight of the vegetative plant parts,

[0534] (vii) if the solvent comprises an alcohol the process produces a yield of the oil product between a minimum of 36%, 37%, 38%, 39% or 40% and a maximum of 65% or 70% by weight relative to the dry weight of the vegetative plant parts,

[0535] (viii) if the solvent comprises about 80% water, the oil product comprises about 30% of C13-C22 hydrocarbon compounds,

[0536] (ix) if the solvent comprises about 50% methanol, the oil product comprises about 50% fatty acid methyl esters (FAME),

[0537] (x) the recovered oil product has a water content of less than about 15% by weight,

[0538] (xi) the yield of oil product is at least 2% greater by weight relative to a corresponding process using corresponding vegetative plant parts whose non-polar lipid content is less than 2% on a dry weight basis, and

[0539] (xii) the vegetative plant parts in step (i)(a) have been physically processed by one or more of drying, chopping, shredding, milling, rolling, pressing, crushing or grinding.

[0540] In a further embodiment of the two above aspects, the process further comprises one or more of:

[0541] (i) hydrodeoxygenation of the recovered oil product,

[0542] (ii) treatment of the recovered oil product with hydrogen to reduce the levels of ketones or sugars in the oil product,

[0543] (iii) production of syngas from the recovered oil product, and

[0544] (iv) fractionating the recovered oil product to produce one or more of fuel oil, diesel oil, kerosene or gasoline.

[0545] In a further embodiment of the two above aspects, the vegetative plant parts comprise plant leaves, stems or both.

[0546] In an embodiment of the two above aspects, the vegetative plant parts which are treated are further characterised by one or more features as defined in the context of the Sorghum sp. or Zea mays plant parts or cells of the invention.

[0547] In another aspect, the present invention provides a process for producing an industrial product, the process comprising the steps of:

[0548] i) obtaining a cell according to the invention, preferably a Sorghum sp. or Zea mays cell, a plant or part thereof of the invention, preferably a Sorghum sp. or Zea mays plant or part thereof, or a seed of the invention, and

[0549] ii) either
[0550] a) converting at least some of the lipid in the cell, plant or part thereof, or seed of step i) to the industrial product by applying heat, chemical, or enzymatic means, or any combination thereof, to the lipid in situ in the cell, plant or part thereof, or seed, or
[0551] b) physically processing the cell, plant or part thereof, or seed of step i), and subsequently or simultaneously converting at least some of the lipid in the processed cell, plant or part thereof, or seed to the industrial product by applying heat, chemical, or enzymatic means, or any combination thereof, to the lipid in the processed cell, plant or part thereof, or seed, and

[0552] iii) recovering the industrial product,

thereby producing the industrial product.

[0553] In an embodiment, the plant part is a vegetative plant part of the invention.

[0554] In an embodiment, the step of physically processing the cell, plant or part thereof, or seed comprises one or more of rolling, pressing, crushing or grinding the cell, plant or part thereof, or seed. The industrial product is as described herein.

[0555] In a further embodiment, the process further comprises the steps of:

[0556] (a) extracting at least some of the non-polar lipid content of the cell, plant or part thereof, or seed as non-polar lipid, and

[0557] (b) recovering the extracted non-polar lipid, wherein steps (a) and (b) are performed prior to the step of converting at least some of the lipid in the cell, plant or part thereof, or seed to the industrial product. The extracted non-polar lipid preferably comprises triacylglycerols, wherein the triacylglycerols comprise at least 90%, more preferably at least 95%, of the extracted lipid.

[0558] In another aspect, the present invention provides a process for producing extracted lipid, the process comprising the steps of:

[0559] i) obtaining a cell according to the invention, preferably a Sorghum sp. or Zea mays cell, a plant or part thereof of the invention, preferably a Sorghum sp. or Zea mays plant or part thereof, or a seed of the invention,

[0560] ii) extracting lipid from the cell, plant or part thereof, or seed, and

[0561] iii) recovering the extracted lipid, thereby producing the extracted lipid.

[0562] In an embodiment, the step of extraction comprises one or more of drying, rolling, pressing, crushing or grinding the plant or part thereof, or seed, and/or purifying the extracted lipid or seedoil. In an embodiment, the process uses an organic solvent in the extraction process to extract the oil.

[0563] In an embodiment, the process comprises recovering the extracted lipid by collecting it in a container and/or one or more of degumming, deodorising, decolourising, drying, fractionating the extracted lipid, removing at least some waxes and/or wax esters from the extracted lipid, or analysing the fatty acid composition of the extracted lipid.

[0564] In an embodiment, the volume of the extracted lipid or oil is at least 1 litre.

[0565] In a further embodiment, one or more or all of the following features apply:

[0566] (i) the extracted lipid or oil comprises triacylglycerols, wherein the triacylglycerols comprise at least 90%, preferably at least 95% or at least 96%, of the extracted lipid or oil,

[0567] (ii) the extracted lipid or oil comprises free sterols, steroyl esters, steroyl glycosides, waxes or wax esters, or any combination thereof, and

[0568] (iii) the total sterol content and/or composition in the extracted lipid or oil is significantly different to the sterol content and/or composition in the extracted lipid or oil produced from a corresponding plant or part thereof, or seed.

[0569] In a further embodiment, the process further comprises converting the extracted lipid to an industrial product.

[0570] In a further embodiment, the industrial product is a hydrocarbon product such as fatty acid esters, preferably fatty acid methyl esters and/or a fatty acid ethyl esters, an alkane such as methane, ethane or a longer-chain alkane, a mixture of longer chain alkanes, an alkene, a biofuel, carbon monoxide and/or hydrogen gas, a bioalcohol such as ethanol, propanol, or butanol, biochar, or a combination of carbon monoxide, hydrogen and biochar.

[0571] In a further embodiment, the plant part is an aerial plant part or a green plant part, preferably a vegetative plant part such as a plant leaf or stem.

[0572] In yet a further embodiment, the step of obtaining the plant or part thereof comprises a step of harvesting the plant or part thereof with a mechanical harvester.

[0573] In another embodiment, the level of a lipid in the plant or part thereof, or seed and/or in the extracted lipid or oil is determinable by analysis by using gas chromatography of fatty acid methyl esters prepared from the extracted lipid or oil.

[0574] In another embodiment, the plant part is a vegetative plant part which comprises a total TAG content of at least about 11%, at least about 12%, at least about 15%, at least about 20%, at least about 25%, at least about 30%, at least about 35%, at least about 40%, at least about 45%, at least about 50%, at least about 55%, at least about 60%, at least about 65%, at least about 70%, between 8% and 75%, between 10% and 75%, between 11% and 75%, between about 15% and 75%, between about 20% and 75%, between about 30% and 75%, between about 40% and 75%, between about 50% and 75%, between about 60% and 75%, or between about 25% and 50% (w/w dry weight).

[0575] In an embodiment of the above aspects, the cells, plants or parts thereof or seeds which are used are further characterised by one or more features as defined in the context of the plant parts or cells of the invention, preferably the Sorghum sp. or Zea mays plant parts or cells.

[0576] In another aspect, the present invention provides a process for producing seed, the process comprising:

[0577] i) growing a plant according to the invention, and

[0578] ii) harvesting seed from the plant.

[0579] In an embodiment, the process comprises growing a population of at least about 1,500, at least about 3,000 or at least about 5,000 plants, each being a plant of the invention, and harvesting seed from the population of plants.

[0580] In another aspect, the present invention provides recovered or extracted lipid or soluble protein obtainable from a plant cell according to the invention, preferably a Sorghum sp. or Zea mays cell, a plant or part thereof of the invention, preferably a Sorghum sp. or Zea mays plant or part thereof, a seed of the invention, or obtainable by a process of the invention.

[0581] In another aspect, the present invention provides an industrial product produced by the process according to the invention, which is a hydrocarbon product such as fatty acid esters, preferably fatty acid methyl esters and/or a fatty acid ethyl esters, an alkane such as methane, ethane or a longer-chain alkane, a mixture of longer chain alkanes, an alkene, a biofuel, carbon monoxide and/or hydrogen gas, a bioalcohol such as ethanol, propanol, or butanol, biochar, or a combination of carbon monoxide, hydrogen and biochar.

[0582] In another aspect, the present invention provides use of a cell according to the invention, preferably a Sorghum sp. or Zea mays cell, a plant or part thereof of the invention, preferably a Sorghum sp. or Zea mays plant or part thereof, a seed of the invention, or the recovered or extracted lipid of the invention for the manufacture of an industrial product. Examples of industrial products of the invention include those described in the previous aspect.

[0583] In another aspect, the present invention provides a process for producing fuel, the process comprising:

[0584] i) reacting the lipid of the invention with an alcohol, optionally, in the presence of a catalyst, to produce alkyl esters, and

[0585] ii) optionally, blending the alkyl esters with petroleum based fuel.

[0586] In another aspect, the present invention provides a process for producing a synthetic diesel fuel, the process comprising:

[0587] i) converting the lipid in a cell according to the invention, preferably a Sorghum sp. or Zea mays cell, a plant or part thereof of the invention, preferably a Sorghum sp. or Zea mays plant or part thereof, or a seed of the invention to a bio-oil by a process comprising pyrolysis or hydrothermal processing or to a syngas by gasification, and

[0588] ii) converting the bio-oil to synthetic diesel fuel by a process comprising fractionation, preferably selecting hydrocarbon compounds which condense between about 150° C. to about 200° C. or between about 200° C. to about 300° C., or converting the syngas to a biofuel using a metal catalyst or a microbial catalyst.

[0589] In another aspect, the present invention provides a process for producing a biofuel, the process comprising converting the lipid in a cell according to the invention, preferably a Sorghum sp. or Zea mays cell, a plant or part thereof of the invention, preferably a Sorghum sp. or Zea mays plant or part thereof, or a seed of the invention to bio-oil by pyrolysis, a bioalcohol by fermentation, or a biogas by gasification or anaerobic digestion.

[0590] In an embodiment, the part is a vegetative plant part.

[0591] The present inventors have also identified a sub-class of oleosins with improved activity, particularly in relation to optimised oil production in transgenic plants.

[0592] Thus, in a further aspect, the present invention provides a recombinant eukaryotic cell comprising at least a first exogenous polynucleotide which encodes an oleosinL, wherein the exogenous polynucleotide is operably linked to a promoter which is capable of directing expression of the polynucleotide in the cell. In an embodiment, the first exogenous polynucleotide comprises one or more of the following:

[0593] i) nucleotides encoding an oleosinL polypeptide comprising amino acids whose sequence is set forth as any one of SEQ ID NOs: 305 to 314, or a biologically active fragment thereof, or an oleosinL polypeptide whose amino acid sequence is at least 30% identical to any one or more of SEQ ID NOs: 305 to 314,

[0594] ii) nucleotides whose sequence is at least 30% identical to i), and

[0595] iii) a polynucleotide which hybridizes to one or both of i) or ii) under stringent conditions. In an alternate embodiment, the at least first exogenous polynucleotide comprises one or more of the following:

[0596] i) nucleotides encoding an oleosinL polypeptide comprising amino acids whose sequence is set forth as any one of SEQ ID NOs: 306 to 314, or a biologically active fragment thereof, or an oleosinL polypeptide whose amino acid sequence is at least 30% identical to any one or more of SEQ ID NOs: 306 to 314,

[0597] ii) nucleotides whose sequence is at least 30% identical to i), and

[0598] iii) a polynucleotide which hybridizes to one or both of i) or ii) under stringent conditions. In an embodiment, the oleosinL is not allergenic, or not known to be allergenic, such as to humans. In an embodiment, the oleosinL is not sesame oleosinL (SEQ ID NO:305).

[0599] In an embodiment, the recombinant cell further comprises one or more of the following;

[0600] a) an exogenous polynucleotide which encodes a transcription factor polypeptide that increases the expression of one or more glycolytic and/or fatty acid biosynthetic genes in the cell,

[0601] b) an exogenous polynucleotide which encodes a polypeptide involved in the biosynthesis of one or more non-polar lipids,

[0602] c) a genetic modification which down-regulates endogenous production and/or activity of a polypeptide involved in the catabolism of triacylglycerols (TAG) in the cell when compared to a corresponding cell lacking the genetic modification,

[0603] d) an exogenous polynucleotide which encodes a polypeptide which increases the export of fatty acids out of plastids of the cell when compared to a corresponding cell lacking the fourth exogenous polynucleotide,

[0604] e) an exogenous polynucleotide which encodes a second transcription factor polypeptide that increases the expression of one or more glycolytic and/or fatty acid biosynthetic genes in the cell,

[0605] f) a genetic modification which down-regulates endogenous production and/or activity of a polypeptide involved in importing fatty acids into plastids of the cell when compared to a corresponding cell lacking the second genetic modification, and

[0606] g) a genetic modification which down-regulates endogenous production and/or activity of a polypeptide involved in diacylglycerol (DAG) production in the plastid when compared to a corresponding cell lacking the third genetic modification, wherein each exogenous polynucleotide is operably linked to a promoter which is capable of directing expression of the polynucleotide in the cell. In an embodiment, the recombinant cell comprises, in addition to the at least a first exogenous polynucleotide which encodes an oleosinL, a combination of exogenous polynucleotides and/or genetic modifications as outlined above.

[0607] In an embodiment, the cell is a plant cell from or in a vegetative part of a plant and one or more or all of the promoters are expressed at a higher level in the vegetative part relative to seed of the plant.

[0608] In an embodiment, the first exogenous polynucleotide is codon optimised for expression in a plant cell such as a Z. mays or Sorghum sp cell.

[0609] In an embodiment, one or more or all of the following features apply to the above aspect;

[0610] i) the cell has an increased synthesis of total fatty acids relative to a corresponding cell lacking the first exogenous polynucleotide, or a decreased catabolism of total fatty acids relative to a corresponding cell lacking the first exogenous polynucleotide, or both, such that it has an increased level of total fatty acids relative to a corresponding cell lacking the first exogenous polynucleotide,

[0611] ii) the cell has an increased expression and/or activity of a fatty acyl acyltransferase which catalyses the synthesis of TAG, DAG or MAG, preferably TAG, relative to a corresponding cell having the first exogenous polynucleotide and lacking the exogenous polynucleotide which encodes a polypeptide involved in the biosynthesis of one or more non-polar lipids,

[0612] iii) the cell has a decreased production of lysophosphatidic acid (LPA) from acyl-ACP and G3P in its plastids relative to a corresponding cell having the first exogenous polynucleotide and lacking the genetic modification which down-regulates endogenous production and/or activity of a polypeptide involved in diacylglycerol (DAG) production in the plastid in the cell,

[0613] iv) the cell has an altered ratio of C16:3 to C18:3 fatty acids in its total fatty acid content and/or its galactolipid content relative to a corresponding cell lacking the exogenous polynucleotide(s) and/or genetic modification(s), preferably a decreased ratio,

[0614] v) the cell is in a vegetative part of a plant and comprises a total non-polar lipid content of at least about 8%, at least about 10%, at least about 11%, at least about 12%, at least about 15%, at least about 20%, at least about 25%, at least about 30%, at least about 35%, at least about 40%, at least about 45%, at least about 50%, at least about 55%, at least about 60%, at least about 65%, at least about 70%, between 8% and 75%, between 10% and 75%, between 11% and 75%, between about 15% and 75%, between about 20% and 75%, between about 30% and 75%, between about 40% and 75%, between about 50% and 75%, between about 60% and 75%, or between about 25% and 50% (w/w dry weight),

[0615] vi) the cell is in a vegetative part of a plant and comprises a TAG content of at least about 8%, at least about 10%, at least about 11%, at least about 12%, at least about 15%, at least about 20%, at least about 25%, at least about 30%, at least about 35%, at least about 40%, at least about 45%, at least about 50%, at least about 55%, at least about 60%, at least about 65%, at least about 70%, between 8% and 75%, between 10% and 75%, between 11% and 75%, between about 15% and 75%, between about 20% and 75%, between about 30% and 75%, between about 40% and 75%, between about 50% and 75%, between about 60% and 75%, or between about 25% and 50% (w/w dry weight),

[0616] vii) the transcription factor polypeptide is selected from the group consisting of Wrinkled 1 (WRI1), Leafy Cotyledon 1 (LEC1), LEC1-like, Leafy Cotyledon 2 (LEC2), BABY BOOM (BBM), FUS3, ABI3, ABI4, ABI5, Dof4 and Dof11,

[0617] viii) oleic acid comprises at least 20% (mol %), at least 22% (mol %), at least 30% (mol %), at least 40% (mol %), at least 50% (mol %), or at least 60% (mol %), preferably about 65% (mol %) or between 20% and about 65% of the total fatty acid content in the cell,

[0618] ix) non-polar lipid in the cell comprises a fatty acid which comprises a hydroxyl group, an epoxy group, a cyclopropane group, a double carbon-carbon bond, a triple carbon-carbon bond, conjugated double bonds, a branched chain such as a methylated or hydroxylated branched chain, or a combination of two or more thereof, or any of two, three, four, five or six of the aforementioned groups, bonds or branched chains,

[0619] x) non-polar lipid in the cell comprises one or more polyunsaturated fatty acids selected from eicosadienoic acid (EDA), arachidonic acid (ARA), stearidonic acid (SDA), eicosatrienoic acid (ETE), eicosatetraenoic acid (ETA), eicosapentaenoic acid (EPA), docosapentaenoic acid (DPA), docosahexaenoic acid (DHA), or a combination of two of more thereof,

[0620] xi) the cell is in a plant or part thereof, preferably a vegetative plant part, or the cell is an algal cell such as a diatom (bacillariophytes), green algae (chlorophytes), blue-green algae (cyanophytes), golden-brown algae (chrysophytes), haptophytes, brown algae or heterokont algae, or the cell is from or is an organism suitable for fermentation such as a fungus,

[0621] xii) one or more or all of the promoters are selected from a tissue-specific promoter such as a leaf and/or stem specific promoter, a developmentally regulated promoter such as a senescense-specific promoter such as a SAG12 promoter, an inducible promoter, or a circadian-rhythm regulated promoter,

[0622] xiii) the cell comprises a total fatty acid content which comprises medium chain fatty acids, preferably C12:0, C14:0 or both, at a level of at least 5% of the total fatty acid content and optionally an exogenous polynucleotide which encodes an LPAAT which has preferential activity for fatty acids with a medium chain length (C8 to C14), preferably C12:0 or C14:0,

[0623] xiv) the cell comprises a total fatty acid content whose oleic acid level is increased by at least 2% relative to a corresponding cell lacking the exogenous polynucleotide(s) and/or genetic modification(s), and/or whose α-linolenic acid (ALA) level is decreased by at least 2% relative to a corresponding cell lacking the exogenous polynucleotide(s) and/or genetic modification(s),

[0624] xv) non-polar lipid in the cell comprises a modified level of total sterols, preferably free (non-esterified) sterols, steroyl esters, steroyl glycosides, relative to the non-polar lipid in a corresponding cell lacking the exogenous polynucleotide(s) and/or genetic modification(s),

[0625] xvi) non-polar lipid in the cell comprises waxes and/or wax esters,

[0626] xvii) the cell is one member of a population or collection of at least about 1000 such cells, preferably in a vegetative plant part or a seed,

[0627] xviii) the cell comprises an exogenous polynucleotide encoding a silencing suppressor, wherein the exogenous polynucleotide is operably linked to a promoter which is capable of directing expression of the polynucleotide in the cell,

[0628] xix) the level of one or more non-polar lipid(s) and/or the total non-polar lipid content of the cell is at least 2% greater on a weight basis than in a corresponding cell which comprises exogenous polynucleotides encoding an Arabidposis thaliana WRI1 (SEQ ID NO:21) and an Arabidopsis thaliana DGAT1 (SEQ ID NO:1), and

[0629] xx) a total polyunsaturated fatty acid (PUFA) content which is decreased relative to the total PUFA content of a corresponding cell lacking the exogenous polynucleotide(s) and/or genetic modification(s).

[0630] Also provided is a non-human organism, or part thereof, comprising one or more cells of the above aspect. In a preferred embodiment, the non-human organism or part thereof is a transgenic plant or part thereof.

[0631] Other aspects defined herein in relation to features such as, but not necessarily limited to, a population of plants, a collection of plant parts, a storage bin, seeds, extracts, a method of producing a plant, process for producing a feedstuff, feedstuffs, process for feeding an animal, process for producing an industrial product, process for producing extracted lipid, process for producing seed, recovered or extracted lipid, industrial products, process for producing fuel, process for producing a synthetic diesel fuel, process for producing a biofuel and method of producing a plant extract, can be applied to the cells, or transgenic plants or parts thereof comprising the cells, of the above aspect.

[0632] Any embodiment herein shall be taken to apply mutatis mutandis to any other embodiment unless specifically stated otherwise.

[0633] The present invention is not to be limited in scope by the specific embodiments described herein, which are intended for the purpose of exemplification only. Functionally-equivalent products, compositions and methods are clearly within the scope of the invention, as described herein.

[0634] Throughout this specification, unless specifically stated otherwise or the context requires otherwise, reference to a single step, composition of matter, group of steps or group of compositions of matter shall be taken to encompass one and a plurality (i.e. one or more) of those steps, compositions of matter, groups of steps or group of compositions of matter.

[0635] The invention is hereinafter described by way of the following non-limiting Examples and with reference to the accompanying figures.

### BRIEF DESCRIPTION OF THE ACCOMPANYING DRAWINGS

[0636] FIG. 1. A representation of lipid synthesis in eukaryotic cells, showing export of some of the fatty acids synthesized in the plastids to the Endoplasmic Reticulum (ER) via the Plastid Associated Membrane (PLAM), and import of some of the fatty acids into the plastid from the ER for eukaryotic galactolipid synthesis. Abbreviations:
[0637] Acetyl-CoA and Malonyl-CoA: acetyl-coenzyme A and malonyl-coenzymeA;
[0638] ACCase: Acetyl-CoA carboxylase;
[0639] FAS: fatty acid synthase complex;
[0640] 16:0-ACP, 18:0-ACP and 18:1-ACP: C16:0-acyl carrier protein (ACP), C18:0-acyl carrier protein, C18:1-acyl carrier protein;
[0641] KAS II: ketoacyl-ACP synthase II (EC 2.3.1.41);
[0642] PLPAAT: plastidial LPAAT;
[0643] PGPAT: plastidial GPAT;
[0644] PAP: PA phosphorylase (EC 3.1.3.4);
[0645] G3P: glycerol-3-phosphate;
[0646] LPA: lysophosphatidic acid;
[0647] PA: phosphatidic acid;
[0648] DAG: diacylglycerol;
[0649] TAG: triacylglycerol;
[0650] Acyl-CoA and Acyl-PC: acyl-coenzyme A and acyl-phosphatidylcholine;
[0651] PC: phosphatidylcholine;
[0652] GPAT: glycerol-3-phosphate acyltransferase;
[0653] LPAAT: lysophosphatidic acid acyltransferase (EC 2.3.1.51);
[0654] LPCAT: acyl-CoA:lysophosphatidylcholine acyltransferase; or synonyms 1-acylglycerophosphocholine O-acyltransferase; acyl-CoA:1-acyl-sn-glycero-3-phosphocholine O-acyltransferase (EC 2.3.1.23);
[0655] CPT: CDP-choline:diacylglycerol cholinephosphotransferase; or synonyms 1-alkyl-2-acetylglycerol cholinephosphotransferase; alkylacylglycerol cholinephosphotransferase; cholinephosphotransferase; phosphorylcholine-glyceride transferase (EC 2.7.8.2);
[0656] PDCT: phosphatidylcholine:diacylglycerol cholinephosphotransferase;
[0657] PLC: phospholipase C (EC 3.1.4.3);
[0658] PLD: Phospholipase D; choline phosphatase; lecithinase D; lipophosphodiesterase II (EC 3.1.4.4);
[0659] PDAT: phospholipid:diacylglycerol acyltransferase; or synonym phospholipid:1,2-diacyl-sn-glycerol O-acyltransferase (EC 2.3.1.158);
[0660] FAD2: fatty acid Δ12-desaturase; FAD3, fatty acid Δ15-desaturase;
[0661] UDP-Gal: Uridine diphosphate galactose;
[0662] MGDS: monogalactosyldiacylglycerol synthase;
[0663] MGDG: monogalactosyldiacylglycerol; DGDG: digalactosyldiacylglycerol
[0664] FAD6, 7, 8: plastidial fatty acid Δ12-desaturase, plastidial ω3-desaturase, plastidial ω3-desaturase induced at low temperature, respectively.

[0665] FIG. 2. Schematic representation of the N. benthainiana SDP1 hairpin construct. The genetic segments shown are as described in Example 2. Abbreviations are as for FIG. 12. attB sites represent recombination sites from the pHELLSGATE12 vector.

[0666] FIG. 3. TAG content in green leaf samples of tobacco plants transformed with the T-DNA from pOIL51, lines #61 and #69, harvested before flowering. The controls (parent) samples were from plants transformed with the T-DNA from pJP3502.

[0667] FIG. 4. TAG levels (% dry weight) in root and stem tissue of wild-type (wt) and transgenic N. tabacum plants containing the T-DNA from pJP3502 alone or additionally with the T-DNA from pOIL051.

[0668] FIG. 5. TAG content in leaf samples of transformed tobacco plants at seed-setting stage of growth, transformed with the T-DNA from pOIL049, lines #23c and #32b. The controls (parent) samples were from plants transformed with the T-DNA from pJP3502. The upper line shows 18:2 percentage in the TAG and the lower line shows the 18:3 (ALA) percentage in the fatty acid content.

[0669] FIG. 6. TAG levels (% dry weight) in root and stem tissue of wild-type (wt) and transgenic N. tabacum plants containing the T-DNA from pJP3502 alone or additionally with the T-DNA from pOIL049.

[0670] FIG. 7. A. Starch content in leaf tissue from wild-type plants (WT) and transgenic plants containing the T-DNA from pJP3502 (HO control) or the T-DNAs from both pJP3502 and pOIL051 (pOIL51.61 and pOIL51.69) or both pJP3502 and pOIL049 (pOIL49.32b). Data represent combined results from at least three individual plants. B. Correlation between starch and TAG content in leaf tissue of wild-type plants (WT) and transgenic plants containing the T-DNA from pJP3502 (HO control) or T-DNAs from both pJP3502 and pOIL051 (pOIL51.61 and pOIL51.69) or both pJP3502 and pOIL049 (pOIL49.32b). Data represent combined results from at least three individual plants.

[0671] FIG. 8. Starch and soluble sugar contents on a dry weight (DW) basis in senescing leaves of wild-type plants (open circles) and transgenic plants (filled circles) (T1) sampled at seed setting stage. The transgenic N. tabacum plants included those designated HO, SDP1 and LEC2. In each case three plants were included in the analysis. Data points are based on triplicate analyses.

[0672] FIG. 9. Leaf N (A) and soluble protein (B) of WT and HO leaves of different ages harvested from plants 69 DAS.

[0673] FIG. 10. Leaf soluble protein content in WT and HO tobacco as a function of leaf and plant age.

[0674] FIG. 11. Mean total fatty acid (TFA) content in mg/100 mg dry weight of leaves 9, 15 and 20 in tobacco plants grown under modified conditions: increased light intensity (top left panel); control (top right panel); increased photoperiod, increased light intensity and increased CO2 concentration (lower left panel); reduced photoperiod at high light intensity (lower right panel).

[0675] FIG. 12. TLC separation of total leaf lipids extracted from wildtype and transgenic S. bicolor. Wt, wildtype; EV, empty vector control; 2, S. bicolor transformed with pOIL136 (event 2); TAG, triacylglycerol; FFA, free fatty acids; DAG, diacylglycerol. Leaf tissue was harvested from young, vegetative plants following transfer to soil.

[0676] FIG. 13. A. Lipid levels in sorghum leaves transformed with a combination of the genetic constructs pOIL103 and pOIL197, at the vegetative stage of growth. The levels (weight % of dry weight) of TFA, TAG and polar lipids are shown. Each set of 4 bars show, in order, the levels in leaves from wild-type plants (WT, blue), empty vector control plants (EV, orange) and transgenic plants TX-03-8 (grey) and TX-03-38 (yellow). B. Levels of the galactolipids MGDG and DGDG and of the phospholipids PG, PC, PE, PA, PS and PI in the leaves as for A.

[0677] FIG. 14. Schematic diagram of vector pOIL122. Abbreviations: TER Agrtu-Nos, Agrobacterium tumefaciens nopaline synthase terminator; NPTII, neomycin phosphotransferase protein coding region; PRO CaMV35S-Ex2, Cauliflower Mosaic Virus 35S promoter with double enhancer region; Arath-DGAT1, Arabidopsis thaliana DGAT1 acyltransferase protein coding region; PRO Arath-Rubisco SSU, A. thaliana Rubisco small subunit promoter; Arath-FATA2, A. thaliana FATA2 thioesterase protein coding region; Arath-WRI, A. thaliana WRI1 transcription factor protein coding region; TER Glyma-Lectin, Glycine max lectin terminator; enTCUP2 promoter, Nicotiana tabacum cryptic constitutive promoter; attB1 and attB2, Gateway recombination sites; NB SDP1 fragment, Nicotiana benthamiana SDP1 region targeted for hpRNAi silencing; OCS terminator, A. tumefaciens octopine synthase terminator. Backbone features outside the T-DNA region are derived from pORE04 (Coutu et al., 2007).

[0678] FIG. 15. TAG levels (% leaf dry weight) in N. benthamiana leaf tissue, infiltrated with genes encoding different WRI1 polypeptides either with (right hand bars) or without (left hand bars) co-expression of DGAT1 (n=3). All samples were infiltrated with the P19 construct as well.

[0679] FIG. 16. Phylogenetic tree of LDAP polypeptides (Example 11).

[0680] FIG. 17. Schematic representation of the genetic construct pJP3506 including the T-DNA region between the left and right borders. Abbreviations are as for FIG. 12 and: Sesin-Oleosin, Sesame indicum oleosin protein coding region.

[0681] FIG. 18. Fatty acid content of transgenic wheat seed.

[0682] FIG. 19. Levels of TFA and TAG (weight % of leaf dry weight) in leaves of sorghum plants at the boot leaf stage of growth, for wild-type plants (Neg contr), plants transformed with a genetic construct to express DGAT and Oleosin (DGAT+Oleosin), plants transformed with a genetic construct to express WRI expressed from a Ubi promoter (Ubi::WRI1), plants transformed with genetic constructs to express DGAT, Oleosin and WRI expressed from a Ubi promoter (Ubi::WRI1+DGAT+Oleosin), plants transformed with genetic constructs to express DGAT, Oleosin and WRI expressed from a PEPC promoter (PEPC::WRI1+DGAT+Oleosin), plants transformed with genetic constructs to express DGAT, Oleosin and WRI expressed from a SSU promoter (SSU::WRI1+DGAT+Oleosin). Each dot represents the levels seen for an independent transgenic plant. For each plant type, the column of dots on the left (blue) shows TFA levels, and the column of dots on the right (red) shows TAG levels in the same set of plants.

[0683] FIG. 20. TAG content and fatty acid composition for selected fatty acids in N. benthamiana leaf tissues after introduction of genes encoding WRI1, DGAT1 and an oil body polypeptide (pOIL382-387).

### KEY TO THE SEQUENCE LISTING

[0684] SEQ ID NO:1 Arabidopsis thaliana DGAT1 polypeptide (CAB44774.1)
SEQ ID NO:2 Arabidopsis thaliana DGAT2 polypeptide (NP_566952.1)
SEQ ID NO:3 Ricinus communis DGAT2 polypeptide (AAY16324.1)
SEQ ID NO:4 Vernicia fordii DGAT2 polypeptide (ABC94474.1)
SEQ ID NO:5 Mortierella ramanniana DGAT2 polypeptide (AAK84179.1)
SEQ ID NO:6 Homo sapiens DGAT2 polypeptide (Q96PD7.2)
SEQ ID NO:7 Homo sapiens DGAT2 polypeptide (Q58HT5.1)
SEQ ID NO:8 Bos taurus DGAT2 polypeptide (Q70VZ8.1)
SEQ ID NO:9 Mus musculus DGAT2 polypeptide (AAK84175.1)
SEQ ID NO:10 YFP tripeptide—conserved DGAT2 and/or MGAT1/2 sequence motif
SEQ ID NO:11 HPHG tetrapeptide—conserved DGAT2 and/or MGAT1/2 sequence motif
SEQ ID NO:12 EPHS tetrapeptide—conserved plant DGAT2 sequence motif
SEQ ID NO:13 RXGFX(K/R)XAXXXGXXX(L/V)VPXXXFG(E/Q)—long conserved sequence motif of DGAT2 which is part of the putative glycerol phospholipid domain
SEQ ID NO:14 FLXLXXXN—conserved sequence motif of mouse DGAT2 and MGAT1/2 which is a putative neutral lipid binding domain
SEQ ID NO:15 plsC acyltransferase domain (PF01553) of GPAT
SEQ ID NO:16 HAD-like hydrolase (PF12710) superfamily domain of GPAT
SEQ ID NO:17 Phosphoserine phosphatase domain (PF00702). GPAT4-8 contain a N-terminal region homologous to this domain
SEQ ID NO:18 Conserved GPAT amino acid sequence GDLVICPEGTTCREP
SEQ ID NO:19 Conserved GPAT/phosphatase amino acid sequence (Motif I)
SEQ ID NO:20 Conserved GPAT/phosphatase amino acid sequence (Motif III)
SEQ ID NO:21 Arabidopsis thaliana WRI1 polypeptide (A8MS57)
SEQ ID NO:22 Arabidopsis thaliana WRI1 polypeptide (Q6X5Y6)
SEQ ID NO:23 Arabidopsis lyrata subsp. lyrata WRI1 polypeptide (XP 002876251.1)
SEQ ID NO:24 Brassica napus WRI1 polypepetide (ABD16282.1)
SEQ ID NO:25 Brassica napus WRI1 polyppetide (AD016346.1)
SEQ ID NO:26 Glycine max WRI1 polypeptide (XP_003530370.1)
SEQ ID NO:27 Jatropha curcas WRI1 polypeptide (AE022131.1)
SEQ ID NO:28 Ricinus communis WRI1 polypeptide (XP_002525305.1)
SEQ ID NO:29 Populus trichocarpa WRI1 polypeptide (XP_002316459.1)
SEQ ID NO:30 Vitis vinifera WRI1 polypeptide (CBI29147.3)
SEQ ID NO:31 Brachypodium distachyon WRI1 polypeptide (XP_003578997.1)
SEQ ID NO:32 Hordeum vulgare subsp. vulgare WRI1 polypeptide (BAJ86627.1)
SEQ ID NO:33 Oryza sativa WRI1 polypeptide (EAY79792.1)
SEQ ID NO:34 Sorghum bicolor WRI1 polypeptide (XP_002450194.1)
SEQ ID NO:35 Zea mays WRI1 polypeptide (ACG32367.1)
SEQ ID NO:36 Brachypodium distachyon WRI1 polypeptide (XP_003561189.1)
SEQ ID NO:37 Brachypodium sylvaticum WRI1 polypeptide (ABL85061.1)
SEQ ID NO:38 Oryza sativa WRI1 polypeptide (BAD68417.1)
SEQ ID NO:39 Sorghum bicolor WRI1 polypeptide (XP_002437819.1)
SEQ ID NO:40 Sorghum bicolor WRI1 polypeptide (XP_002441444.1)
SEQ ID NO:41 Glycine max WRI1 polypeptide (XP_003530686.1)
SEQ ID NO:42 Glycine max WRI1 polypeptide (XP_003553203.1)
SEQ ID NO:43 Populus trichocarpa WRI1 polypeptide (XP_002315794.1)
SEQ ID NO:44 Vitis vinifera WRI1 polypeptide (XP_002270149.1)
SEQ ID NO:45 Glycine max WRI1 polypeptide (XP_003533548.1)
SEQ ID NO:46 Glycine max WRI1 polypeptide (XP_003551723.1)
SEQ ID NO:47 Medicago truncatula WRI1 polypeptide (XP_003621117.1)
SEQ ID NO:48 Populus trichocarpa WRI1 polypeptide (XP_002323836.1)
SEQ ID NO:49 Ricinus communis WRI1 polypeptide (XP_002517474.1)
SEQ ID NO:50 Vitis vinifera WRI1 polypeptide (CAN79925.1)
SEQ ID NO:51 Brachypodium distachyon WRI1 polypeptide (XP_003572236.1)
SEQ ID NO:52 Oryza sativa WRI1 polypeptide (BAD10030.1)
SEQ ID NO:53 Sorghum bicolor WRI1 polypeptide (XP_002444429.1)
SEQ ID NO:54 Zea mays WRI1 polypeptide (NP_001170359.1)
SEQ ID NO:55 Arabidopsis lyrata subsp. lyrata WRI1 polypeptide (XP_002889265.1)
SEQ ID NO:56 Arabidopsis thaliana WRI1 polypeptide (AAF68121.1)
SEQ ID NO:57 Arabidopsis thaliana WRI1 polypeptide (NP_178088.2)
SEQ ID NO:58 Arabidopsis lyrata subsp. lyrata WRI1 polypeptide (XP_002890145.1)
SEQ ID NO:59 Thellungiella halophila WRI1 polypeptide (BAJ33872.1)
SEQ ID NO:60 Arabidopsis thaliana WRI1 polypeptide (NP_563990.1)
SEQ ID NO:61 Glycine max WRI1 polypeptide (XP_003530350.1)
SEQ ID NO:62 Brachypodium distachyon WRI1 polypeptide (XP_003578142.1)
SEQ ID NO:63 Oryza sativa WRI1 polypeptide (EAZ09147.1)
SEQ ID NO:64 Sorghum bicolor WRI1 polypeptide (XP_002460236.1)
SEQ ID NO:65 Zea mays WRI1 polypeptide (NP_001146338.1)
SEQ ID NO:66 Glycine max WRI1 polypeptide (XP_003519167.1)
SEQ ID NO:67 Glycine max WRI1 polypeptide (XP_003550676.1)
SEQ ID NO:68 Medicago truncatula WRI1 polypeptide (XP_003610261.1)
SEQ ID NO:69 Glycine max WRI1 polypeptide (XP_003524030.1)
SEQ ID NO:70 Glycine max WRI1 polypeptide (XP_003525949.1)
SEQ ID NO:71 Populus trichocarpa WRI1 polypeptide (XP_002325111.1)
SEQ ID NO:72 Vitis vinifera WRI1 polypeptide (CBI36586.3)
SEQ ID NO:73 Vitis vinifera WRI1 polypeptide (XP_002273046.2)
SEQ ID NO:74 Populus trichocarpa WRI1 polypeptide (XP_002303866.1)
SEQ ID NO:75 Vitis vinifera WRI1 polypeptide (CBI25261.3)

### SEQ ID NO:76 Sorbi-WRL1

### SEQ ID NO: 77 Lupan-WRL1

### SEQ ID NO:78 Ricco-WRL1

[0685] SEQ ID NO:79 Lupin angustifolius WRI1 polypeptide
SEQ ID NO:80 Aspergillus fumigatus DGAT1 polypeptide (XP_755172.1)
SEQ ID NO:81 Ricinus communis DGAT1 polypeptide (AAR11479.1)
SEQ ID NO:82 Vernicia fordii DGAT1 polypeptide (ABC94472.1)
SEQ ID NO:83 Vernonia galamensis DGAT1 polypeptide (ABV21945.1)
SEQ ID NO:84 Vernonia galamensis DGAT1 polypeptide (ABV21946.1)
SEQ ID NO:85 Euonymus alatus DGAT1 polypeptide (AAV31083.1)
SEQ ID NO:86 Caenorhabditis elegans DGAT1 polypeptide (AAF82410.1)
SEQ ID NO:87 Rattus norvegicus DGAT1 polypeptide (NP_445889.1)
SEQ ID NO:88 Homo sapiens DGAT1 polypeptide (NP_036211.2)
SEQ ID NO:89 WRI1 motif (R G V T/S R H R W T G R)
SEQ ID NO:90 WRI1 motif (F/Y E A H L W D K)
SEQ ID NO:91 WRI1 motif (D L A A L K Y W G)
SEQ ID NO:92 WRI1 motif (S X G F S/A R G X)
SEQ ID NO:93 WRI1 motif (H H H/Q N G R/K W E A R I G R/K V)
SEQ ID NO:94 WRI1 motif (Q E E A A A X Y D)
SEQ ID NO:95 Brassica napus oleosin polypeptide (CAA57545.1)
SEQ ID NO:96 Brassica napus oleosin S1-1 polypeptide (ACG69504.1)
SEQ ID NO:97 Brassica napus oleosin S2-1 polypeptide (ACG69503.1)
SEQ ID NO:98 Brassica napus oleosin 53-1 polypeptide (ACG69513.1)
SEQ ID NO:99 Brassica napus oleosin S4-1 polypeptide (ACG69507.1)
SEQ ID NO:100 Brassica napus oleosin S5-1 polypeptide (ACG69511.1)
SEQ ID NO:101 Arachis hypogaea oleosin 1 polypeptide (AAZ20276.1)
SEQ ID NO:102 Arachis hypogaea oleosin 2 polypeptide (AAU21500.1)
SEQ ID NO:103 Arachis hypogaea oleosin 3 polypeptide (AAU21501.1)
SEQ ID NO:104 Arachis hypogaea oleosin 5 polypeptide (ABC96763.1)
SEQ ID NO:105 Ricinus communis oleosin 1 polypeptide (EEF40948.1)
SEQ ID NO:106 Ricinus communis oleosin 2 polypeptide (EEF51616.1)
SEQ ID NO:107 Glycine max oleosin isoform a polypeptide (P29530.2)
SEQ ID NO:108 Glycine max oleosin isoform b polypeptide (P29531.1)
SEQ ID NO:109 Linum usitatissimum oleosin low molecular weight isoform polypeptide (ABB01622.1)
SEQ ID NO:110 amino acid sequence of Linum usitatissimum oleosin high molecular weight isoform polypeptide (ABB01624.1)
SEQ ID NO:111 Helianthus annuus oleosin polypeptide (CAA44224.1)
SEQ ID NO:112 Zea mays oleosin polypeptide (NP_001105338.1)
SEQ ID NO:113 Brassica napus steroleosin polypeptide (ABM30178.1)
SEQ ID NO:114 Brassica napus steroleosin SLO1-1 polypeptide (ACG69522.1)
SEQ ID NO:115 Brassica napus steroleosin SLO2-1 polypeptide (ACG69525.1)
SEQ ID NO:116 Sesamum indicum steroleosin polypeptide (AAL13315.1)
SEQ ID NO:117 Zea mays steroleosin polypeptide (NP_001152614.1)
SEQ ID NO:118 Brassica napus caleosin CLO-1 polypeptide (ACG69529.1)
SEQ ID NO:119 Brassica napus caleosin CLO-3 polypeptide (ACG69527.1)
SEQ ID NO:120 Sesamum indicum caleosin polypeptide (AAF13743.1)
SEQ ID NO:121 Zea mays caleosin polypeptide (NP_001151906.1)
SEQ ID NO:122 pJP3502 TDNA (inserted into genome) sequence
SEQ ID NO:123 pJP3507 vector sequence
SEQ ID NO:124 Linker sequence
SEQ ID NO:125 Partial Nicotiana benthamiana CGI-58 sequence selected for hpRNAi silencing (pTV46)
SEQ ID NO:126 Partial N. tabacum AGPase sequence selected for hpRNAi silencing (pTV35)
SEQ ID NO:127 GXSXG lipase motif
SEQ ID NO:128 HX(4)D acyltransferase motif
SEQ ID NO:129 VX(3)HGF probable lipid binding motif
SEQ ID NO:130 Arabidopsis thaliana CGi58 polynucleotide (NM_118548.1)
SEQ ID NO:131 Brachypodium distachyon CGi58 polynucleotide (XM_003578402.1)
SEQ ID NO:132 Glycine max CGi58 polynucleotide (XM_003523590.1)
SEQ ID NO:133 Zea mays CGi58 polynucleotide (NM_001155541.1)
SEQ ID NO:134 Sorghum bicolor CGi58 polynucleotide (XM_002460493.1)
SEQ ID NO:135 Ricinus communis CGi58 polynucleotide (XM_002510439.1)
SEQ ID NO:136 Medicago truncatula CGi58 polynucleotide (XM_003603685.1)
SEQ ID NO:137 Arabidopsis thaliana LEC2 polynucleotide (NM_102595.2)
SEQ ID NO:138 Medicago truncatula LEC2 polynucelotide (X60387.1)
SEQ ID NO:139 Brassica napus LEC2 polynucelotide (HM370539.1)
SEQ ID NO:140 Arabidopsis thaliana BBM polynucleotide (NM_121749.2)
SEQ ID NO:141 Medicago truncatula BBM polynucleotide (AY899909.1)
SEQ ID NO:142 Arabidopsis thaliana LEC2 polypeptide (NP_564304.1)
SEQ ID NO:143 Medicago truncatula LEC2 polypeptide (CAA42938.1)
SEQ ID NO:144 Brassica napus LEC2 polypeptide (AD016343.1)
SEQ ID NO:145 Arabidopsis thaliana BBM polypeptide (NP_197245.2)
SEQ ID NO:146 Medicago truncatula BBM polypeptide (AAW82334.1)
SEQ ID NO:147 Inducible Aspergillus niger alcA promoter
SEQ ID NO:148 AlcR inducer that activates the AlcA promotor in the presence of ethanol
SEQ ID NO:149 Arabidopsis thaliana LEC1; (AAC39488)
SEQ ID NO:150 Arabidopsis lyrata LEC1 (XP_002862657)
SEQ ID NO:151 Brassica napus LEC1 (ADF81045)
SEQ ID NO:152 Ricinus communis LEC1 (XP_002522740)

### SEQ ID NO:153 Glycine max LEC1 (XP_006582823)

[0686] SEQ ID NO:154 Medicago truncatula LEC1 (AFK49653)
SEQ ID NO:155 Zea mays LEC1 (AAK95562)
SEQ ID NO:156 Arachis hypogaea LEC1 (ADC33213)
SEQ ID NO:157 Arabidopsis thaliana LEC1-like (AAN15924)
SEQ ID NO:158 Brassica napus LEC1-like (AHI94922)
SEQ ID NO:159 Phaseolus coccineus LEC1-like (AAN01148)
SEQ ID NO:160 Arabidopsis thaliana FUS3 (AAC35247)
SEQ ID NO:161 Brassica napus FUS3
SEQ ID NO:162 Medicago truncatula FUS3
SEQ ID NO:163 Arabidopsis thaliana SDP1 cDNA sequence, Accession No. NM_120486, 3275nt
SEQ ID NO:164 Brassica napus SDP1 cDNA; Accession No. GN078290
SEQ ID NO:165 Brachypodium distachyon SDP1 cDNA, 2670nt
SEQ ID NO:166 Populus trichocarpa SDP1 cDNA, 3884nt
SEQ ID NO:167 Medicago truncatula SDP1 cDNA; XM_003591377; 2490nt
SEQ ID NO:168 Glycine max SDP1 cDNA XM_003521103; 2783nt
SEQ ID NO:169 Sorghum bicolor SDP1 cDNA XM_002458486; 2724 nt
SEQ ID NO:170 Zea mays SDP1 cDNA, NM_001175206; 2985nt
SEQ ID NO:171 Physcomitrella patens SDP1 cDNA, XM_001758117; 1998 nt
SEQ ID NO:172 Hordeum vulgare SDP1 cDNA, AK372092; 3439nt
SEQ ID NO:173 Nicotiana benthamiana SDP1 cDNA, Nbv5tr6404201
SEQ ID NO:174 Nicotiana benthamicma SDP1 cDNA region targeted for hpRNAi silencing
SEQ ID NO:175 Promoter of Arabidopsis thaliana SDP1 gene, 1.5 kb
SEQ ID NO:176 Nucleotide sequence of the complement of the pSSU-Oleosin gene in the T-DNA of pJP3502. In order (complementary sequences): Glycine max Lectin terminator 348nt, 3′ exon 255nt, UBQ10 intron 304nt, 5′ exon 213nt, SSU promoter 1751nt
SEQ ID NO:177 Arabidopsis thaliana plastidial GPAT cDNA, NM_179407
SEQ ID NO:178 Arabidopsis thaliana plastidial GPAT polypeptide, NM_179407
SEQ ID NO:179 Populus trichocarpa plastidial GPAT cDNA, XP_006368351
SEQ ID NO:180 Jatropha curcas plastidial GPAT cDNA, ACR61638
SEQ ID NO:181 Ricinus communis plastidial GPAT cDNA, XP_002518993
SEQ ID NO:182 Helianthus annuus plastidial GPAT cDNA, ADV16382
SEQ ID NO:183 Medicago truncatula plastidial GPAT cDNA, XP_003612801
SEQ ID NO:184 Glycine max plastidial GPAT cDNA, XP_003516958
SEQ ID NO:185 Carthamus tinctorius plastidial GPAT cDNA, CAHG3PACTR
SEQ ID NO:186 Solanum tuberosum plastidial GPAT cDNA, XP_006352898
SEQ ID NO:187 Oryza sativa Japonica plastidial GPAT cDNA, NM_001072027
SEQ ID NO:188 Sorghum bicolor plastidial GPAT cDNA, XM_002467381
SEQ ID NO:189 Zea mays plastidial GPAT cDNA, NM_001158637
SEQ ID NO:190 Hordeum vulgare plastidial GPAT cDNA, AK371419
SEQ ID NO:191 Physcomitrella patens plastidial GPAT cDNA, XM_001771247
SEQ ID NO:192 Chlamydomonas reinhardtii plastidial GPAT cDNA, XM_001694925
SEQ ID NO:193 Arabidopsis thaliana FATA1
SEQ ID NO:194 Arabidopsis thaliana FATA2
SEQ ID NO:195 Arabidopsis thaliana FATB
SEQ ID NO:196 Arabidopsis thaliana WRI3
SEQ ID NO:197 Arabidopsis thaliana WRI4
SEQ ID NO:198 Avena sativa WRI1
SEQ ID NO:199 Sorghum bicolor WRI1
SEQ ID NO:200 Zea mays WRI1
SEQ ID NO:201 Triadica sebifera WRI1
SEQ ID NO:202 S. tuberosum Patatin B33 promoter sequence
SEQ ID NOs 203 to 206 and 236 to 245 Oligonucleotide primers
SEQ ID NO:207 Z. mays SEE1 promoter region (1970nt from Accession number AJ494982)
SEQ ID NO:208 A. littoralis A1SAP promoter sequence, Accession No DQ885219
SEQ ID NO:209 A. rhizogenes ArRolC promoter sequence, Accession No. DQ160187
SEQ ID NO:210 hpRNAi construct containing a 732 bp fragment of N. benthamiana plastidial GPAT
SEQ ID NO:211 Elaeis guineensis (oil palm) DGAT1
SEQ ID NO:212 G. max MYB73, Accession No. ABH02868
SEQ ID NO:213 A. thaliana bZIP53, Accession No. AAM14360
SEQ ID NO:214 A. thaliana AGL15, Accession No NP_196883
SEQ ID NO:215 A. thaliana MYB118, Accession No. AAS58517
SEQ ID NO:216 A. thaliana MYB115, Accession No. AAS10103
SEQ ID NO:217 A. thaliana TANMEI, Accession No. BAE44475
SEQ ID NO:218 A. thaliana WUS, Accession No. NP_565429
SEQ ID NO:219 B. napus GFR2a1, Accession No. AFB74090
SEQ ID NO:220 B. napus. GFR2a2, Accession No. AFB74089
SEQ ID NO:221 A. thaliana PHR1, Accession No. AAN72198
SEQ ID NO:222 N. benthamiana TGD1 fragment
SEQ ID NO:223 Potato SDP1 amino acid
SEQ ID NO:224 Potato SDP1 nucleotide sequence
SEQ ID NO:225 Potato AGPase small subunit
SEQ ID NO:226 Potato AGPase small subunit nucleotide sequence:
SEQ ID NO:227 Sapium sebiferum LDAP-1 nucleotide sequence
SEQ ID NO:228 Sapium sebiferum LDAP-1 amino acid sequence
SEQ ID NO:229 Sapium sebiferum LDAP-2 nucleotide sequence
SEQ ID NO:230 Sapium sebiferum LDAP-2 amino acid sequence
SEQ ID NO:231 Sapium sebiferum LDAP-3 nucleotide sequence
SEQ ID NO:232 Sapium sebiferum LDAP-3 amino acid sequence
SEQ ID NO:233 S. bicolor SDP1 (accession number XM_002463620)
SEQ ID NO:234 T. aestivum SDP1 nucleotide sequence (Accession number AK334547)
SEQ ID NO:235 S. bicolor SDP1 hpRNAi fragment.
SEQ ID NO:246 Saccharum hybrid DIRIGENT (DIR16) promoter sequence
SEQ ID NO:247 Saccharum hybrid 0-Methyl transferase (OMT) promoter sequence
SEQ ID NO:248 Sequence of the A1 promoter allele of the Saccharum hybrid R1MYB1 gene
SEQ ID NO:249 Saccharum hybrid Loading Stem Gene 5 (LSG5) promoter sequence
SEQ ID NO:250 Nucleotide sequence of the protein coding region of the cDNA for Sorghum bicolor TGD5 gene, Accession No. XM_002442154; 297 nt
SEQ ID NO:251 Amino acid sequence of Sorghum bicolor TGD5 polypeptide, Accession No. XM_002442154; 98aa
SEQ ID NO:252 Nucleotide sequence of the protein coding region of the cDNA for Zea mays TGD5 gene, Accession No. EU972796.1; 297nt
SEQ ID NO:253 Amino acid sequence of Zea mays TGD5 polypeptide, Accession No. EU972796.1; 98aa
SEQ ID NO:254 Nucleotide sequence of the protein coding region of the cDNA for Sorghum bicolor gene encoding AGPase small subunit (Accession No. XM_002462095.1); 1533nt
SEQ ID NO:255 Amino acid sequence of Sorghum bicolor AGPase small subunit polypeptide (Accession No. XM_002462095.1); 510aa
SEQ ID NO:256 Nucleotide sequence of the protein coding region of the cDNA for Zea mays gene encoding AGPase small subunit polypeptide (Accession No. XM_008666513.1); 1554nt
SEQ ID NO:257 Amino acid sequence of Zea mays AGPase small subunit polypeptide (Accession No. XM_008666513.1); 517aa
SEQ ID NO:258 Nucleotide sequence of the protein coding region of the cDNA for Sorghum bicolor PDAT1 gene (Accession No. XM_002462417.1);
SEQ ID NO:259 Amino acid sequence of Sorghum bicolor PDAT1 polypeptide (Accession No. XM_002462417.1); 682aa
SEQ ID NO:260 Nucleotide sequence of the protein coding region of the cDNA for Zea mays PDAT1 gene (Accession No. NM_001147943); 2037nt
SEQ ID NO:261 Amino acid sequence of Zea mays PDAT1 polypeptide (Accession No. NM_001147943); 678aa
SEQ ID NO:262 Nucleotide sequence of the protein coding region of the cDNA for Sorghum bicolor PDCT gene (Accession No. XM_002437214); 846nt
SEQ ID NO:263 Amino acid sequence of Sorghum bicolor PDCT polypeptide (Accession No. XM_002437214); 281aa
SEQ ID NO:264 Nucleotide sequence of the protein coding region of the cDNA for Zea mays PDCT gene (Accession No. EU973573.1); 849nt
SEQ ID NO:265 Amino acid sequence of Zea mays PDCT polypeptide (Accession No. EU973573.1); 282aa
SEQ ID NO:266 Nucleotide sequence of the protein coding region of the cDNA for Sorghum bicolor TST1 gene (Accession No. XM_002467535.1); 2223nt
SEQ ID NO:267 Amino acid sequence of Sorghum bicolor TST1 polypeptide (Accession No. XM_002467535.1); 740aa
SEQ ID NO:268 Nucleotide sequence of the protein coding region of the cDNA for Zea mays TST1 gene (Accession No. NM_001158464); 2244nt
SEQ ID NO:269 Amino acid sequence of Zea mays TST1 polypeptide (Accession No. NM_001158464); 747aa
SEQ ID NO:270 Nucleotide sequence of the protein coding region of the cDNA for Sorghum bicolor TST2 gene (Sb04G008150; Sobic.004G099300; Accession No. KXG29849.1); 2238nt
SEQ ID NO:271 Amino acid sequence of Sorghum bicolor TST2 polypeptide (Accession No. KXG29849.1); 745aa
SEQ ID NO:272 Nucleotide sequence of the protein coding region of the cDNA for Zea mays TST2 gene (Accession No. XM_008647398.1); 2238nt
SEQ ID NO:273 Amino acid sequence of Zea mays TST2 polypeptide (Accession No. XM_008647398.1); 745aa
SEQ ID NO:274 Nucleotide sequence of the protein coding region of the cDNA for Sorghum bicolor INV3 gene (Sobic.004G004800; Sb04g000620; Accession No. XM_002451312); 1464nt
SEQ ID NO:275 Amino acid sequence of Sorghum bicolor INV3 polypeptide (Accession No. XM_002451312); 487aa
SEQ ID NO:276 Amino acid sequence of Sorghum bicolor INV3 polypeptide; alternative longer splicing form (Accession No. EES04332.2); 638aa
SEQ ID NO:277 Nucleotide sequence of the protein coding region of the cDNA for Zea mays INV2 gene (maize homolog to Sb INV3) (Accession No. NM_001305860.1); 2022nt
SEQ ID NO:278 Amino acid sequence of Zea mays INV2 polypeptide (maize homolog to Sb INV3) (Accession No. NM_001305860.1); 673aa
SEQ ID NO:279 Nucleotide sequence of the protein coding region of the cDNA for Sorghum bicolor SUS4 gene (Sobic.001G344500; Sb01g033060; Accession No. XM_002465116.1); 2451nt
SEQ ID NO:280 Amino acid sequence of Sorghum bicolor SUS4 polypeptide (Accession No. XM_002465116.1); 816aa
SEQ ID NO:281 Nucleotide sequence of the protein coding region of the cDNA for Zea mays SUS1 gene (maize homolog to Sb SUS4) (Accession No. NM_001111853); 2451nt
SEQ ID NO:282 Amino acid sequence of Zea mays SUS1 polypeptide (Accession No. NM_001111853); 816aa
SEQ ID NO:283 Nucleotide sequence of the protein coding region of the cDNA for Sorghum bicolor bCIN gene (Sobic.004G172700; Sb04g022350; Accession No. XM_002453920.1);
SEQ ID NO:284 Amino acid sequence of Sorghum bicolor bCIN polypeptide (Accession No. XM_002453920.1); 559aa
SEQ ID NO:285 Nucleotide sequence of the protein coding region of the cDNA for Zea mays cytosolic INV gene (homolog of Sb bCIN) (Accession No. NM_001175248.1); 1680nt
SEQ ID NO:286 Amino acid sequence of Zea mays INV polypeptide (Accession No. NM_001175248.1); 559aa
SEQ ID NO:287 Nucleotide sequence of the protein coding region of the cDNA for Sorghum bicolor SUT4 gene (Sb04g038030; Accession No. XM_002453038.1); 1785nt
SEQ ID NO:288 Amino acid sequence of Sorghum bicolor SUT4 polypeptide (Accession No. XM_002453038.1); 594aa
SEQ ID NO:289 Nucleotide sequence of the protein coding region of the cDNA for Zea mays SUT2 gene (Accession No. AY581895.1); 1779nt
SEQ ID NO:290 Amino acid sequence of Zea mays SUT2 polypeptide (Accession No. AY581895.1); 592aa
SEQ ID NO:291 Nucleotide sequence of the protein coding region of the cDNA for Arabidopsis thaliana SWEET16 gene (Accession No. NM_001338249.1); 693nt
SEQ ID NO:292 Amino acid sequence of Arabidopsis thaliana SWEET16 polypeptide (Accession No. NM_001338249.1); 230aa
SEQ ID NO:293 Nucleotide sequence of the protein coding region of the cDNA for Arabidopsis thaliana MED15-1 gene (Accession No. NM_101446.4); 4008nt
SEQ ID NO:294 Amino acid sequence of Arabidopsis thaliana MED15-1 polypeptide (Accession No. NM_101446.4); 1335aa
SEQ ID NO:295 Nucleotide sequence of the protein coding region of the cDNA for Zea mays MED15-1 gene (Accession No. NM_001321633.1); 3927nt SEQ ID NO:296 Amino acid sequence of Zea mays MED15-1 polypeptide (Accession No. NM_001321633.1); 1308aa
SEQ ID NO:297 Nucleotide sequence of the protein coding region of the cDNA for Arabidopsis thaliana 14-3-3κ gene (Accession No. AY079350);
SEQ ID NO:298 Amino acid sequence of Arabidopsis thaliana 14-3-3K polypeptide (Accession No. AY079350); 248aa
SEQ ID NO:299 Nucleotide sequence of the protein coding region of the cDNA for Sorghum bicolor 14-3-3κ gene (Accession No. XM_002445734.1); 762nt
SEQ ID NO:300 Amino acid sequence of Sorghum bicolor 14-3-3K polypeptide (Accession No. XM_002445734.1); 253aa
SEQ ID NO:301 Nucleotide sequence of the protein coding region of the cDNA for Arabidopsis thaliana 14-3-32 gene (Accession No. NM_001203346); 777nt
SEQ ID NO:302 Amino acid sequence of Arabidopsis thaliana 14-3-32 polypeptide (Accession No. NM_001203346); 258aa
SEQ ID NO:303 Nucleotide sequence of the protein coding region of the cDNA for Sorghum bicolor 14-3-3λ gene (Accession No. XM_002445734.1); 762nt
SEQ ID NO:304 Amino acid sequence of Sorghum bicolor 14-3-3λ polypeptide (Accession No. XM_002445734.1); 253aa
SEQ ID NO:305 Amino acid sequence of Sesamum indicum oleosinL polypeptide (Accession No. AF091840)
SEQ ID NO:306 Amino acid sequence of Ficus pumila var. awkeotsang oleosinL ortholog polypeptide (Accession No. ABQ57397.1)
SEQ ID NO:307 Amino acid sequence of Cucumis sativus oleosinL ortholog polypeptide (Accession No. XP_004146901.1)
SEQ ID NO:308 Amino acid sequence of Linum usitatissimum oleosinL ortholog polypeptide (Accession No. ABB01618.1)
SEQ ID NO:309 Amino acid sequence of Glycine max oleosinL ortholog polypeptide (Accession No. XP_003556321.2)
SEQ ID NO:310 Amino acid sequence of Ananas comosus oleosinL ortholog polypeptide (Accession No. OAY72596.1)
SEQ ID NO:311 Amino acid sequence of Setaria italica oleosinL ortholog polypeptide (Accession No. XP_004956407.1)
SEQ ID NO:312 Amino acid sequence of Fragaria vesca subsp. vesca oleosinL ortholog polypeptide (Accession No. XP_004307777.1)
SEQ ID NO:313 Amino acid sequence of Brassica napus oleosinL ortholog polypeptide (Accession No. CDY03377.1)
SEQ ID NO:314 Amino acid sequence of Solanum lycopersicum oleosinL ortholog polypeptide (Accession No. XP_004240765.1)

### DETAILED DESCRIPTION OF THE INVENTION

### General Techniques

[0687] Unless specifically defined otherwise, all technical and scientific terms is used herein shall be taken to have the same meaning as commonly understood by one of ordinary skill in the art (e.g., in cell culture, molecular genetics, plant biology, cell biology, protein chemistry, lipid and fatty acid chemistry, animal nutrition, bifocal production, and biochemistry).

[0688] Unless otherwise indicated, the recombinant protein, cell culture, and immunological techniques utilized in the present invention are standard procedures, well known to those skilled in the art. Such techniques are described and explained throughout the literature in sources such as, J. Perbal, A Practical Guide to Molecular Cloning, John Wiley and Sons (1984), J. Sambrook et al., Molecular Cloning: A Laboratory Manual, Cold Spring Harbour Laboratory Press (1989), T. A. Brown (editor), Essential Molecular Biology: A Practical Approach, Volumes 1 and 2, IRL Press (1991), D. M. Glover and B. D. Hames (editors), DNA Cloning: A Practical Approach, Volumes 1-4, IRL Press (1995 and 1996), F. M. Ausubel et al. (editors), Current Protocols in Molecular Biology, Greene Pub. Associates and Wiley-Interscience (1988, including all updates until present), Ed Harlow and David Lane (editors) Antibodies: A Laboratory Manual, Cold Spring Harbour Laboratory, (1988), and J. E. Coligan et al. (editors) Current Protocols in Immunology, John Wiley & Sons (including all updates until present).

### Selected Definitions

[0689] The term “exogenous” in the context of a polynucleotide or polypeptide refers to the polynucleotide or polypeptide when present in a cell or a plant or part thereof which does not naturally comprise the polynucleotide or polypeptide. Such a cell is referred to herein as a “recombinant cell” or a “transgenic cell” and a plant comprising the cell as a “transgenic plant”. In an embodiment, the exogenous polynucleotide or polypeptide is from a different genus to the cell of the plant or part thereof comprising the exogenous polynucleotide or polypeptide. In another embodiment, the exogenous polynucleotide or polypeptide is from a different species. In one embodiment, the exogenous polynucleotide or polypeptide expressed in the plant cell is from a different species or genus. The exogenous polynucleotide or polypeptide may be non-naturally occurring, such as for example, a synthetic DNA molecule which has been produced by recombinant DNA methods. The DNA molecule may, preferably, include a protein coding region which has been codon-optimised for expression in the plant cell, thereby producing a polypeptide which has the same amino acid sequence as a naturally occurring polypeptide, even though the nucleotide sequence of the protein coding region is non-naturally occurring. The exogenous polynucleotide may encode, or the exogenous polypeptide may be, for example: a diacylglycerol acyltransferase (DGAT) such as a DGAT1 or a DGAT2, a Wrinkled 1 (WRI1) transcription factor, on OBC such as an Oleosin or preferably an LDAP, a fatty acid thioesterase such as a FATA or FATB polypeptide, or a silencing suppressor polypeptide. In an embodiment, a cell of the invention is a recombinant cell.

[0690] As used herein, the term “triacylglycerol (TAG) content” or variations thereof refers to the amount of TAG in the cell, plant or part thereof. TAG content can be calculated using techniques known in the art such as the sum of glycerol and fatty acyl moieties using a relation: % TAG by weight=100×((41×total mol FAME/3)+(total g FAME−(15×total mol FAME)))/g, where 41 and 15 are molecular weights of glycerol moiety and methyl group, respectively (where FAME is fatty acid methyl esters) (see Examples such as Example 1).

[0691] As used herein, the term “total fatty acid (TFA) content” or variations thereof refers to the total amount of fatty acids in the cell, plant or part thereof on a weight basis, as a percentage of the weight of the cell, plant or part thereof. Unless otherwise specified, the weight of the cell, plant or part thereof is the dry weight of the cell, plant or part thereof. TFA content is measured as described in Example 1 herein. The method involves conversion of the fatty acids in the sample to FAME and measurement of the amount of FAME by GC, using addition of a known amount of a distinctive fatty acid standard such as C17:0 as a quantitation standard in the GC. TFA therefore represents the weight of just the fatty acids, not the weight of the fatty acids and their linked moieties in the plant lipid.

[0692] As used herein, the“TAG/TFA Quotient” or “TTQ” parameter is calculated as the level of TAG (%) divided by the level of TFA (%), each as a percentage of the dry weight of the plant material. For example, a TAG level of 6% comprised in a TFA level of 10% yields a TTQ of 0.6. The TAG and TFA levels are measured as described herein. It is understood that, in this context, the TFA level refers to the weight of the total fatty acid content and the TAG level refers to the weight of TAG, including the glycerol moiety of TAG.

[0693] As used herein, the term “soluble protein content” or variations thereof refers to the amount of soluble protein in the plant or part thereof. Soluble protein content can be calculated using techniques known in the art. For instance, fresh tissue can be ground, chlorophyll and soluble sugars extracted by heating to 80° C. in 50-80% (v/v) ethanol in 2.5 mM HEPES buffer at pH 7.5, centriguation, washing pellet in distilled water, resuspending the pellet 0.1 M NaOH and heating to 95° C. for 30 min, and then the Bradford assay (Bradford, 1976) is used determined soluble protein content. Alternatively, fresh tissue can be ground in buffer containing 100 mM Tris-HCl pH 8.0 and 10 mM MgCl₂.

[0694] As used herein, the WI “nitrogen content” or variations thereof refers to the amount of nitrogen in the plant or part thereof. Nitrogen content can be calculated using techniques known in the art. For example, freeze-dried tissue can be analysed using a Europa 20-20 isotope ratio mass spectrometer with an ANCA preparation system, comprising a combustion and reduction tube operating at 1000° C. and 600° C., respectively, to determine nitrogen content.

[0695] As used herein, the term “carbon content” or variations thereof refers to the amount of carbon in the plant or part thereof. Carbon content can be calculated using techniques known in the art. For example, organic carbon levels can be determined using the method described by Shaw (1959), or as described in Example 1.

[0696] As used herein, the term “carbon:nitrogen ratio” or variations thereof refers to the relative amount of carbon in the cell, plant or part thereof when compared to the amount of nitrogen in the cell, plant or part thereof. Carbon and nitrogen contents can be calculated as described above and represented as a ratio.

[0697] As used herein, the term “photosynthetic gene expression” or variations thereof refers to one or more genes expressing proteins involved in photosynthetic pathways in the plant of part thereof. Examples of photosynthetic genes which may be upregulated in plants or parts thereof of the invention include, but are not limited to, one or more of the genes listed in Table 10.

[0698] As used herein, the term “photosynthetic capacity” or variations thereof refers to the ability of the plant or part thereof to photosynthesize (convert light energy to chemical energy). Photosynthetic capacity (Amax) is a measure of the maximum rate at which leaves are able to fix carbon during photosynthesis. It is typically measured as the amount of carbon dioxide that is fixed per metre squared per second, for example as μmol m⁻² sec⁻¹. Photosynthetic capacity can be calculated using techniques known in the art.

[0699] As used herein, the term “total dietary fibre (TDF) content” or variations thereof refers to the amount of fiber (including soluble and insoluble fibre) in the cell, plant or part thereof. As the skilled person would understand, dietary fiber includes non-starch polysaccharides such as arabinoxylans, cellulose, and many other plant components such as resistant starch, resistant dextrins, inulin, lignin, chitins, pectins, β-glucans, and oligosaccharides. TDF can be calculated using techniques known in the art. For example, using the Prosky method (Prosky et al. 1985), the McCleary method (McCleary et al., 2007) or the rapid integrated total dietary fiber method (McCleary et al., 2015).

[0700] As used herein, the term “energy content” or variations thereof refers to the amount of food energy in the plant or part thereof. More specifically, the amount of chemical energy that animals (including humans) derive from their food. Energy content can be calculated using techniques known in the art. For example, energy content can be determined based on heats of combustion in a bomb calorimeter and corrections that take into consideration the efficiency of digestion and absorption and the production of urea and other substances in the urine. As another example, energy content can be calculated as described in Example 1.

[0701] As used herein, the term “extracted lipid” refers to a composition extracted from a cell, plant or part thereof of the invention, such as a transgenic cell, plant or part thereof of the invention, which comprises at least 60% (w/w) lipid.

[0702] As used herein, the term “non-polar lipid” refers to fatty acids and derivatives thereof which are soluble in organic solvents but insoluble in water. The fatty acids may be free fatty acids and/or in an esterified form. Examples of esterified forms of non-polar lipid include, but are not limited to, triacylglycerol (TAG), diacylyglycerol (DAG), monoacylglycerol (MAG). Non-polar lipids also include sterols, sterol esters and wax esters. Non-polar lipids are also known as “neutral lipids”. Non-polar lipid is typically a liquid at room temperature. Preferably, the non-polar lipid predominantly (>50%) comprises fatty acids that are at least 16 carbons in length. More preferably, at least 50% of the total fatty acids in the non-polar lipid are C18 fatty acids for example, oleic acid. In an embodiment, at least 5% of the total fatty acids in the non-polar lipids are C12 or C14 fatty acids, or both. In an embodiment, at least 50%, more preferably at least 70%, more preferably at least 80%, more preferably at least 90%, more preferably at least 91%, more preferably at least 92%, more preferably at least 93%, more preferably at least 94%, more preferably at least 95%, more preferably at least 96%, more preferably at least 97%, more preferably at least 98%, more preferably at least 99% of the fatty acids in non-polar lipid of the invention are present as TAG. The non-polar lipid may be further purified or treated, for example by hydrolysis with a strong base to release the free fatty acid, or by fractionation, distillation, or the like. Non-polar lipid may be present in or obtained from plant parts such as seed, leaves, tubers, beets or fruit. Non-polar lipid of the invention may form part of “seedoil” if it is obtained from seed.

[0703] The free and esterified sterol (for example, sitosterol, campesterol, stigmasterol, brassicasterol, Δ5-avenasterol, sitostanol, campestanol, and cholesterol) concentrations in the extracted lipid may be as described in Phillips et al. (2002). Sterols in plant oils are present as free alcohols, esters with fatty acids (esterified sterols), glycosides and acylated glycosides of sterols. Sterol concentrations in naturally occurring vegetable oils (seedoils) ranges up to a maximum of about 1100 mg/100 g. Hydrogenated palm oil has one of the lowest concentrations of naturally occurring vegetable oils at about 60 mg/100 g. The recovered or extracted seedoils of the invention preferably have between about 100 and about 1000 mg total sterol/100 g of oil. For use as food or feed, it is preferred that sterols are present primarily as free or esterified forms rather than glycosylated forms. In the seedoils of the present invention, preferably at least 50% of the sterols in the oils are present as esterified sterols, except for soybean seedoil which has about 25% of the sterols esterified. The canola seedoil and rapeseed oil of the invention preferably have between about 500 and about 800 mg total sterol/100 g, with sitosterol the main sterol and campesterol the next most abundant. The corn seedoil of the invention preferably has between about 600 and about 800 mg total sterol/100 g, with sitosterol the main sterol. The soybean seedoil of the invention preferably has between about 150 and about 350 mg total sterol/100 g, with sitosterol the main sterol and stigmasterol the next most abundant, and with more free sterol than esterified sterol. The cottonseed oil of the invention preferably has between about 200 and about 350 mg total sterol/100 g, with sitosterol the main sterol. The coconut oil and palm oil of the invention preferably have between about 50 and about 100 mg total sterol/100 g, with sitosterol the main sterol. The safflower seedoil of the invention preferably has between about 150 and about 250 mg total sterol/100 g, with sitosterol the main sterol. The peanut seedoil of the invention preferably has between about 100 and about 200 mg total sterol/100 g, with sitosterol the main sterol. The sesame seedoil of the invention preferably has between about 400 and about 600 mg total sterol/100 g, with sitosterol the main sterol. The sunflower seedoil of the invention preferably has between about 200 and 400 mg total sterol/100 g, with sitosterol the main sterol. Oils obtained from vegetative plant parts according to the invention preferably have less than 200 mg total sterol/100 g, more preferably less than 100 mg total sterol/100 g, and most preferably less than 50 mg total sterols/100 g, with the majority of the sterols being free sterols.

[0704] As used herein, the term “vegetative oil” refers to a composition obtained from vegetative parts of a plant which comprises at least 60% (w/w) lipid, or obtainable from the vegetative parts if the oil is still present in the vegetative part. That is, vegetative oil of the invention includes oil which is present in the vegetative plant part, as well as oil which has been extracted from the vegetative part (extracted oil). The vegetative oil is preferably extracted vegetative oil. Vegetative oil is typically a liquid at room temperature. Preferably, the total fatty acid (TFA) content in the vegetative oil predominantly (>50%) comprises fatty acids that are at least 16 carbons in length. More preferably, at least 50% of the total fatty acids in the vegetative oil are C18 fatty acids for example, oleic acid. The fatty acids are typically in an esterified form such as for example, TAG, DAG, acyl-CoA, galactolipid or phospholipid. The fatty acids may be free fatty acids and/or in an esterified form. In an embodiment, at least 50%, more preferably at least 70%, more preferably at least 80%, more preferably at least 90%, more preferably at least 91%, more preferably at least 92%, more preferably at least 93%, more preferably at least 94%, more preferably at least 95%, more preferably at least 96%, more preferably at least 97%, more preferably at least 98%, more preferably at least 99% of the fatty acids in vegetative oil of the invention can be found as TAG. In an embodiment, vegetative oil of the invention is “substantially purified” or “purified” oil that has been separated from one or more other lipids, nucleic acids, polypeptides, or other contaminating molecules with which it is associated in the vegetative plant part or in a crude extract. It is preferred that the substantially purified vegetative oil is at least 60% free, more preferably at least 75% free, and more preferably, at least 90% free from other components with which it is associated in the vegetative plant part or extract. Vegetative oil of the invention may further comprise non-fatty acid molecules such as, but not limited to, sterols. In an embodiment, the vegetative oil is canola oil (Brassica sp. such as Brassica carinata, Brassica juncea, Brassica napobrassica, Brassica napus) mustard oil (Brassica juncea), other Brassica oil (e.g., Brassica napobrassica, Brassica camelina), sunflower oil (Helianthus sp. such as Helianthus annuus), linseed oil (Linum usitatissimum), soybean oil (Glycine max), safflower oil (Carthamus tinctorius), corn oil (Zea mays), tobacco oil (Nicotiana sp. such as Nicotiana tabacum or Nicotiana benthamiana), peanut oil (Arachis hypogaea), palm oil (Elaeis guineensis), cotton oil (Gossypium hirsutum), coconut oil (Cocos nucifera), avocado oil (Persea americana), olive oil (Olea europaea), cashew oil (Anacardium occidentale), macadamia oil (Macadamia intergrifolia), almond oil (Prunus amygdalus), oat oil (Avena sativa), rice oil (Oryza sp. such as Oryza sativa and Oryza glaberrima), Arabidopsis oil (Arabidopsis thaliana), Aracinis hypogaea (peanut), Beta vulgaris (sugar beet), Camelina sativa (false flax), Crambe abyssinica (Abyssinian kale), Cucumis melo (melon), Hordeum vulgare (barley), Jatropha curcas (physic nut), Joannesia princeps (arara nut-tree), Licania rigida (oiticica), Lupinus angustifblius (lupin), Miscanthus sp. such as Miscanthus×giganteus and Miscanthus sinensis, Panicum virgatum (switchgrass), Pongamia pinnata (Indian beech), Populus trichocarpa, Ricinus communis (castor), Saccharum sp. (sugarcane), Sesamum indicum (sesame), Solanum tuberosum (potato), Sorghum sp. such as Sorghum bicolor, Sorghum vulgare, Theobroma grandiforum (cupuassu), Trifolium sp., and Triticum sp. (wheat) such as Triticum aestivum. Vegetative oil may be extracted from vegetative plant parts by any method known in the art, such as for extracting seedoils. This typically involves extraction with nonpolar solvents such as diethyl ether, petroleum ether, chloroform/methanol or butanol mixtures, generally associated with first crushing of the seeds. Lipids associated with the starch or other polysaccharides may be extracted with water-saturated butanol. The seedoil may be “de-gummed” by methods known in the art to remove polar lipids such as phospholipids or treated in other ways to remove contaminants or improve purity, stability, or colour. The TAGs and other esters in the vegetative oil may be hydrolysed to release free fatty acids, or the oil hydrogenated, treated chemically, or enzymatically as known in the art. As used herein, the term “seedoil” has an analogous meaning except that it refers to a lipid composition obtained from seeds of plants of the invention.

[0705] As used herein, the term “fatty acid” refers to a carboxylic acid with an aliphatic tail of at least 8 carbon atoms in length, either saturated or unsaturated. Preferred fatty acids have a carbon-carbon bonded chain of at least 12 carbons in length. Most naturally occurring fatty acids have an even number of carbon atoms because their biosynthesis involves acetate which has two carbon atoms. The fatty acids may be in a free state (non-esterified) or in an esterified form such as part of a TAG, DAG, MAG, acyl-CoA (thio-ester) bound, acyl-ACP bound, or other covalently bound form. When covalently bound in an esterified form, the fatty acid is referred to herein as an “acyl” group. The fatty acid may be esterified as a phospholipid such as a phosphatidylcholine (PC), phosphatidylethanolamine (PE), phosphatidylserine (PS), phosphatidylglycerol (PG), phosphatidylinositol (PI), or diphosphatidylglycerol. Saturated fatty acids do not contain any double bonds or other functional groups along the chain. The term “saturated” refers to hydrogen, in that all carbons (apart from the carboxylic acid [—COOH] group) contain as many hydrogens as possible. In other words, the omega (co) end contains 3 hydrogens (CH₃—) and each carbon within the chain contains 2 hydrogens (—CH₂—). Unsaturated fatty acids are of similar form to saturated fatty acids, except that one or more alkene functional groups exist along the chain, with each alkene substituting a singly-bonded “—CH₂—CH₂—” part of the chain with a doubly-bonded “—CH═CH—” portion (that is, a carbon double bonded to another carbon). The two next carbon atoms in the chain that are bound to either side of the double bond can occur in a cis or trans configuration.

[0706] As used herein, the terms “monounsaturated fatty acid” or “MUFA” refer to a fatty acid which comprises at least 12 carbon atoms in its carbon chain and only one alkene group (carbon-carbon double bond), which may be in an esterified or non-esterified (free) form. As used herein, the terms “polyunsaturated fatty acid” or “PUFA” refer to a fatty acid which comprises at least 12 carbon atoms in its carbon chain and at least two alkene groups (carbon-carbon double bonds), which may be in an esterified or non-esterified form.

[0707] “Monoacylglyceride” or “MAG” is glyceride in which the glycerol is esterified with one fatty acid. As used herein, MAG comprises a hydroxyl group at an sn-1/3 (also referred to herein as sn-1 MAG or 1-MAG or 1/3-MAG) or sn-2 position (also referred to herein as 2-MAG), and therefore MAG does not include phosphorylated molecules such as PA or PC. MAG is thus a component of neutral lipids in a plant or part thereof.

[0708] “Diacylglyceride” or “DAG” is glyceride in which the glycerol is esterified with two fatty acids which may be the same or, preferably, different. As used herein, DAG comprises a hydroxyl group at a sn-1,3 or sn-2 position, and therefore DAG does not include phosphorylated molecules such as PA or PC. DAG is thus a component of neutral lipids in a plant or part thereof. In the Kennedy pathway of DAG synthesis (FIG. 1), the precursor sn-glycerol-3-phosphate (G3P) is esterified to two acyl groups, each coming from a fatty acid coenzyme A ester, in a first reaction catalysed by a glycerol-3-phosphate acyltransferase (GPAT) at position sn-1 to foam LysoPA, followed by a second acylation at position sn-2 catalysed by a lysophosphatidic acid acyltransferase (LPAAT) to form phosphatidic acid (PA). This intermediate is then de-phosphorylated by PAP to form DAG. DAG may also be formed from TAG by removal of an acyl group by a lipase, or from PC essentially by removal of a choline headgroup by any of the enzymes PDCT, PLC or PLD (FIG. 1).

[0709] “Triacylglyceride” or “TAG” is a glyceride in which the glycerol is esterified with three fatty acids which may be the same (e.g. as in tri-olein) or, more commonly, different. In the Kennedy pathway of TAG synthesis, DAG is formed as described above, and then a third acyl group is esterified to the glycerol backbone by the activity of DGAT. Alternative pathways for formation of TAG include one catalysed by the enzyme PDAT (FIG. 1) and the MGAT pathway described herein.

[0710] As used herein, the term “wild-type” or variations thereof refers to cell, plant or part thereof such as a cell, vegetative plant part, seed, tuber or beet, that has not been genetically modified, such as cells, plants or parts thereof that do not comprise the first and second exogenous polynucleotides, according to this invention.

[0711] The term “corresponding” refers to a cell, plant or part thereof such as a cell, vegetative plant part, seed, tuber or beet, that has the same or similar genetic background as a cell, plant or part thereof such as a vegetative plant part, seed, tuber or beet of the invention but which has not been modified as described herein (for example, a vegetative plant part or seed which lacks the first and second exogenous polynucleotides). In a preferred embodiment, the corresponding plant or part thereof such as a vegetative plant part is at the same developmental stage as the plant or part thereof such as a vegetative plant part of the invention. For example, if the plant is a flowering plant, then preferably the corresponding plant is also flowering. A corresponding cell, plant or part thereof such as a vegetative plant part, can be used as a control to compare levels of nucleic acid or protein expression, or the extent and nature of trait modification, for example TTQ and/or TAG content, with the cell, plant or part thereof such as a vegetative plant part of the invention which is modified as described herein. A person skilled in the art is readily able to determine an appropriate “corresponding” cell, plant or part thereof such as a vegetative plant part for such a comparison.

[0712] As used herein, “compared with” or “relative to” refers to comparing levels of, for example, TTQ or triacylglycerol (TAG) content, one or more or all of soluble protein content, nitrogen content, carbon:nitrogen ratio, photosynthetic gene expression, photosynthetic capacity, total dietary fibre (TDF) content, carbon content, and energy content, or non-polar lipid content or composition, total non-polar lipid content, total fatty acid content or other parameter of the cell, plant or part thereof comprising the one or more exogenous polynucleotides, genetic modifications or exogenous polypeptides with a cell, plant or part thereof such as a vegetative plant part lacking the one or more exogenous polynucleotides, genetic modifications or polypeptides.

[0713] As used herein, “synergism”, “synergistic”, “acting synergistically” and related terms are each a comparative term that means that the effect of a combination of elements present in a plant or part thereof of the invention, for example a combination of elements A and B, is greater than the sum of the effects of the elements separately in corresponding plants or parts thereof, for example the sum of the effect of A and the effect of B. Where more than two elements are present in the plant or part thereof, for example elements A, B and C, it means that the effect of the combination of all of the elements is greater than the sum of the effects of the individual effects of the elements. In a preferred embodiment, it means that the effect of the combination of elements A, B and C is greater than the sum of the effect of elements A and B combined and the effect of element C. In such a case, it can be said that element C acts synergistically with elements A and B. As would be understood, the effects are measured in corresponding cells, plants or parts thereof, for example grown under the same conditions and at the same stage of biological development.

[0714] As used herein, “germinate at a rate substantially the same as for a corresponding wild-type plant” or similar phrases refers to seed of a plant of the invention being relatively able to germinate when compared to seed of a wild-type plant lacking the defined exogenous polynucleotide(s) and genetic modifications. Germination may be measured in vitro on tissue culture medium or in soil as occurs in the field. In one embodiment, the number of seeds which germinate, for instance when grown under optimal greenhouse conditions for the plant species, is at least 75%, more preferably at least 90%, when compared to corresponding wild-type seed. In another embodiment, the seeds which germinate, for instance when grown under optimal glasshouse conditions for the plant species, produce seedlings which grow at a rate which, on average, is at least 75%, more preferably at least 90%, when compared to corresponding wild-type plants. This is referred to as “seedling vigour”. In an embodiment, the rate of initial root growth and shoot growth of seedlings of the invention is essentially the same compared to a corresponding wild-type seedling grown under the same conditions. In an embodiment, the leaf biomass (dry weight) of the plants of the invention is at least 80%, preferably at least 90%, of the leaf biomass relative to a corresponding wild-type plant grown under the same conditions, preferably in the field. In an embodiment, the height of the plants of the invention is at least 70%, preferably at least 80%, more preferably at least 90%, of the plant height relative to a corresponding wild-type plant grown under the same conditions, preferably in the field and preferably at maturity.

[0715] As used herein, the term “an exogenous polynucleotide which down-regulates the production and/or activity of an endogenous polypeptide” or variations thereof, refers to a polynucleotide that encodes an RNA molecule, herein termed a “silencing RNA molecule” or variations thereof (for example, encoding an amiRNA or hpRNAi), that down-regulates the production and/or activity, or itself down-regulates the production and/or activity (for example, is an amiRNA or hpRNA which can be delivered directly to, for example, the plant or part thereof) of an endogenous polypeptide. This includes where the initial RNA transcript produced by expression of the exogenous polynucleotide is processed in the cell to form the actual silencing RNA molecule. The endogenous polypeptides whose production or activity are downregulated include, for example, SDP1 TAG lipase, plastidial GPAT, plastidial LPAAT, TGD polypeptide such as TGD5, TST such as TST1 or TST2, AGPase, PDCT, CPT or Δ12 fatty acid desturase (FAD2), or a combination of two or more thereof. Typically, the RNA molecule decreases the expression of an endogenous gene encoding the polypeptide. The extent of down-regulation is typically less than 100%, for example the production or activity is reduced by between 25% and 95% relative to the wild-type. The optimal level of remaining production or activity can be routinely determined.

[0716] As used herein, the term “on a weight basis” refers to the weight of a substance (for example, TAG, DAG, fatty acid, protein, nitrogen, carbon) as a percentage of the weight of the composition comprising the substance (for example, seed, leaf dry weight). For example, if a transgenic seed has 25 μg total fatty acid per 120 μg seed weight; the percentage of total fatty acid on a weight basis is 20.8%.

[0717] As used herein, the term “on a relative basis” refers to a parameter such as the amount of a substance in a composition comprising the substance in comparison with the parameter for a corresponding composition, as a percentage. For example, a reduction from 3 units to 2 units is a reduction of 33% on a relative basis.

[0718] As used herein, “plastids” are organelles in plants, including algae, which are the site of manufacture of carbon-based compounds from photosynthesis including sugars, starch and fatty acids. Plastids include chloroplasts which contain chlorophyll and carry out photosynthesis, etioplasts which are the predecessors of chloroplasts, as well as specialised plastids such as chromoplasts which are coloured plastids for synthesis and storage of pigments, gerontoplasts which control the dismantling of the photosynthetic apparatus during senescence, amyloplasts for starch synthesis and storage, elaioplasts for storage of lipids, and proteinoplasts for storing and modifying proteins.

[0719] As used herein, the term “biofuel” refers to any type of fuel, typically as used to power machinery such as automobiles, planes, boats, trucks or petroleum powered motors, whose energy is derived from biological carbon fixation. Biofuels include fuels derived from biomass conversion, as well as solid biomass, liquid fuels and biogases. Examples of biofuels include bioalcohols, biodiesel, synthetic diesel, vegetable oil, bioethers, biogas, syngas, solid biofuels, algae-derived fuel, biohydrogen, biomethanol, 2,5-Dimethylfuran (DMF), biodimethyl ether (bioDME), Fischer-Tropsch diesel, biohydrogen diesel, mixed alcohols and wood diesel.

[0720] As used herein, the term “bioalcohol” refers to biologically produced alcohols, for example, ethanol, propanol and butanol. Bioalcohols are produced by the action of microorganisms and/or enzymes through the fermentation of sugars, hemicellulose or cellulose.

[0721] As used herein, the term “biodiesel” refers to a composition comprising fatty acid methyl- or ethyl-esters derived from lipids by transesterification, the lipids being from living cells not fossil fuels.

[0722] As used herein, the term “synthetic diesel” refers to a form of diesel fuel which is derived from renewable feedstock rather than the fossil feedstock used in most diesel fuels.

[0723] As used herein, the term “vegetable oil” includes a pure plant oil (or straight vegetable oil) or a waste vegetable oil (by product of other industries), including oil produced in either a vegetative plant part or in seed. Vegetable oil includes vegetative oil and seedoil, as defined herein.

[0724] As used herein, the term “biogas” refers to methane or a flammable mixture of methane and other gases produced by anaerobic digestion of organic material by anaerobes.

[0725] As used herein, the term “syngas” refers to a gas mixture that contains varying amounts of carbon monoxide and hydrogen and possibly other hydrocarbons, produced by partial combustion of biomass. Syngas may be converted into methanol in the presence of catalyst (usually copper-based), with subsequent methanol dehydration in the presence of a different catalyst (for example, silica-alumina).

[0726] As used herein, the term “biochar” refers to charcoal made from biomass, for example, by pyrolysis of the biomass.

[0727] As used herein, the term “feedstock” refers to a material, for example, biomass or a conversion product thereof (for example, syngas) when used to produce a product, for example, a biofuel such as biodiesel or a synthetic diesel.

[0728] As used herein, the term “industrial product” refers to a hydrocarbon product which is predominantly made of carbon and hydrogen such as, for example, fatty acid methyl- and/or ethyl-esters or alkanes such as methane, mixtures of longer chain alkanes which are typically liquids at ambient temperatures, a biofuel, carbon monoxide and/or hydrogen, or a bioalcohol such as ethanol, propanol, or butanol, or biochar. The term “industrial product” is intended to include intermediary products that can be converted to other industrial products, for example, syngas is itself considered to be an industrial product which can be used to synthesize a hydrocarbon product which is also considered to be an industrial product. The term industrial product as used herein includes both pure forms of the above compounds, or more commonly a mixture of various compounds and components, for example the hydrocarbon product may contain a range of carbon chain lengths, as well understood in the art.

[0729] As used herein, “progeny” means the immediate and all subsequent generations of offspring produced from a parent, for example a second, third or later generation offspring.

[0730] As used herein, the term “ancestor” refers to any earlier generation of the plant comprising the first and second exogenous polynucleotides. The ancestor may be the parent plant, grandparent plant, great grandparent plant and so on.

[0731] As used herein, the term “selecting a plant” means actively selecting the plant on the basis that it has the desired phenotype, such as increased TTQ, increased TAG and protein content when compared to the corresponding wild-type plant.

[0732] As used herein, phrases such as “comprise a TFA content of about 5% (w/w dry weight)”, or “comprise a total TAG content of about 6% (w/w dry weight)”, or similarly structured phrases, mean that more than the defined level may be present. For instance, the phrase “comprise a TFA content of about 5% (w/w dry weight)” can be used interchangeably with “comprises at least about 5% TFA (w/w dry weight)”. Extending this example further, a vegetative plant part which comprise a TFA content of about 5% (w/w dry weight) may have a 6%, or 7.5% or higher TFA content.

[0733] As used herein, unless the context indicates otherwise, the term “increased content” when used in reference to a polypeptide, or similar phrases including reference to specific polypeptide, refers to either an exogenous polypeptide or an endogenous polypeptide. For example, a vegetative plant part of the invention may comprise an increased content of a WRI1 polypeptide, an increased content of a DGAT polypeptide, and a decreased content of a SDP1 polypeptide, each relative to a corresponding wild-type vegetative plant part, wherein each of the WRI1 and DGAT polypeptides is independently either an exogenous polypeptide or an endogenous polypeptide. As another example, a vegetative plant part of the invention may comprise an increased content of a WRI1 polypeptide, an increased content of a DGAT polypeptide, and an increased content of a LEC2 polypeptide, each relative to a corresponding wild-type vegetative plant part, wherein each of the WRI1, DGAT and LEC2 polypeptides is independently either an exogenous polypeptide or an endogenous polypeptide. As a further example, a vegetative plant part of the invention may comprise an increased content of a PDAT or DGAT polypeptide, a decreased content of a TGD polypeptide, and a decreased content of a SDP1 polypeptide, each relative to a corresponding wild-type vegetative plant part wherein the PDAT or DGAT is either an exogenous polypeptide or an endogenous polypeptide, and so on. An exogenous polypepetide may be the result of expression of a transgene encoding the polypeptide in the cell or plant or part thereof of the invention. The endogenous polypeptide may be the result of increased expression of an endogenous gene, such as inducing overexpression and/or providing increased levels of a transcription factor(s) for the gene.

[0734] Throughout this specification the word “comprise”, or variations such as “comprises” or “comprising”, will be understood to imply the inclusion of a stated element, integer or step, or group of elements, integers or steps, but not the exclusion of any other element, integer or step, or group of elements, integers or steps.

[0735] The term “and/or”, e.g., “X and/or Y” shall be understood to mean either “X and Y” or “X or Y” and shall be taken to provide explicit support for both meanings or for either meaning.

[0736] As used herein, the term about, unless stated to the contrary, refers to +/−10%, more preferably +/−5%, more preferably +/−2%, more preferably +/−1%, even more preferably +/−0.5%, of the designated value.

Production of Plants with Modified Traits

[0737] The present invention is based on the finding that plant traits, such two or more of non-polar lipid content, protein content, TTQ, TAG content, nitrogen constant, carbon content, in plants or parts thereof can be increased by a combination of modifications selected from those designated herein as: (A). Push, (B). Pull, (C). Protect, (D). Package, (E). Plastidial Export, (F). Plastidial Import and (G). Prokaryotic Pathway.

[0738] Plants or parts thereof such as a vegetative plant parts of the invention therefore have a number of combinations of exogenous polynucleotides and/or genetic modifications each of which provide for one of the modifications. These exogenous polynucleotides and/or genetic modifications include:

[0739] (A) an exogenous polynucleotide which encodes a transcription factor polypeptide that increases the expression of one or more glycolytic and/or fatty acid biosynthetic genes in the plant or part thereof such as a vegetative plant part, providing the “Push” modification,

[0740] (B) an exogenous polynucleotide which encodes a polypeptide involved in the biosynthesis of one or more non-polar lipids in the plant or part thereof such as a vegetative plant part, providing the “Pull” modification,

[0741] (C) a genetic modification which down-regulates endogenous production and/or activity of a polypeptide involved in the catabolism of triacylglycerols (TAG) in the plant or part thereof such as a vegetative plant part when compared to a corresponding plant or part thereof such as a vegetative plant part lacking the genetic modification, providing the “Protect” modification,

[0742] (D) an exogenous polynucleotide which encodes an oil body coating (OBC) polypeptide such as a lipid droplet associated polypeptide (LDAP), providing the “Package” modification,

[0743] (E) an exogenous polynucleotide which encodes a polypeptide which increases the export of fatty acids out of plastids of the plant or part thereof such as a vegetative plant part, when compared to a corresponding plant or part thereof such as a vegetative plant part lacking the exogenous polynucleotide, providing the “Plastidial Export” modification,

[0744] (F) a genetic modification which down-regulates endogenous production and/or activity of a polypeptide involved in importing fatty acids into plastids of the plant or part thereof such as a vegetative plant part when compared to a corresponding plant or part thereof such as a vegetative plant part lacking the genetic modification, providing the “Plastidial Import” modification, and

[0745] G) a genetic modification which down-regulates endogenous production and/or activity of a polypeptide involved in diacylglycerol (DAG) production in the plastid of the plant or part thereof such as a vegetative plant part when compared to a corresponding plant or part thereof such as a vegetative plant part lacking the genetic modification, providing the “prokaryotic Pathway” modification.

[0746] Preferred combinations (also referred to herein as sets) of exogenous polynucleotides and/or genetic modifications of the invention are;

[0747] 1) A, B and optionally one of C, D, E, F or G;

[0748] 2) A, C and optionally one of D, E, F or G;

[0749] 3) A, D and optionally one of E, F or G;

[0750] 4) A, E and optionally F or G;

[0751] 5) A, F and optionally G;

[0752] 6) A and G;

[0753] 7) A, B, C and optionally one of D, E, F or G;

[0754] 8) A, B, D and optionally one of E, F or G;

[0755] 9) A, B, E and optionally F or G;

[0756] 10) A, B, F and optionally G;

[0757] 11) A, B, C, D and optionally one of E, F or G;

[0758] 12) A, B, C, E and optionally F or G;

[0759] 13) A, B, C, F and optionally G;

[0760] 14) A, B, D, E and optionally F or G;

[0761] 15) A, B, D, F and optionally G;

[0762] 16) A, B, E, F and optionally G;

[0763] 17) A, C, D and optionally one of E, F or G;

[0764] 18) A, C, E and optionally F or G;

[0765] 19) A, C, F and optionally G;

[0766] 20) A, C, D, E and optionally F or G;

[0767] 21) A, C, D, F and optionally G;

[0768] 22) A, C, E, F and optionally a fifth modification G;

[0769] 23) A, D, E and optionally F or G;

[0770] 24) A, D, F and optionally G;

[0771] 25) A, D, E, F and optionally G;

[0772] 26) A, E, F and optionally G;

[0773] 27) Six of A, B, C, D, E, F and G omitting one of A, B, C, D, E, F or G, and

[0774] 28) Any one of 1-26 above where there are two or more exogenous polynucleotides encoding two or more different transcription factor polypeptides that increases the expression of one or more glycolytic and/or fatty acid biosynthetic genes in the plant or part thereof, for example one exogenous polynucleotide encoding WRI1 and another exogenous polynucleotide encoding LEC2.

[0775] In each of the above preferred combinations there may be at least two different exogenous polynucleotides which encode at least two different transcription factor polypeptides that increases the expression of one or more glycolytic and/or fatty acid biosynthetic genes in the plant or part thereof such as a vegetative plant part.

[0776] These modifications are described more fully as follows:

[0777] A. The “Push” modification is characterised by an increased synthesis of total fatty acids in the plastids of the plant or part thereof. In an embodiment, this occurs by the increased expression and/or activity of a transcription factor which regulates fatty acid synthesis in the plastids. In one embodiment, this can be achieved by expressing in a transgenic plant or part thereof an exogenous polynucleotide which encodes a transcription factor polypeptide that increases the expression of one or more glycolytic and/or fatty acid biosynthetic genes in the plant or part thereof. In an embodiment, the increased fatty acid synthesis is not caused by the provision to the plant or part thereof of an altered ACCase whose activity is less inhibited by fatty acids, relative to the endogenous ACCase in the plant or part thereof. In an embodiment, the plant or part thereof comprises an exogenous polynucleotide which encodes the transcription factor, preferably under the control of a promoter other than a constitutive promoter. The transcription factor may be selected from the group consisting of WRI1, LEC1, LEC1-like, LEC2, BBM, FUS3, ABI3, ABI4, ABI5, Dof4, Dof11 or the group consisting of MYB73, bZIP53, AGL15, MYB115, MYB118, TANMEI, WUS, GFR2a1, GFR2a2 and PHR1, and is preferably WRI1, LEC1 or LEC2. In a further embodiment, the increased synthesis of total fatty acids is relative to a corresponding wild-type plant or part thereof. In an embodiment, there are two or more exogenous polynucleotides encoding two or more different transcription factor polypeptides. The “Push” modification may also be achieved by increased expression of polypeptides which modulate activity of WRI1, such as MED15 or 14-3-3 polypeptides.

[0778] B. The “Pull” modification is characterised by increased expression and/or activity in the plant or part thereof of a fatty acyl acyltransferase which catalyses the synthesis of TAG, DAG or MAG in the plant or part thereof, such as a DGAT, PDAT, LPAAT, GPAT or MGAT, preferably a DGAT or a PDAT. In one embodiment, this can be achieved by expressing in a transgenic plant or part thereof an exogenous polynucleotide which encodes a polypeptide involved in the biosynthesis of one or more non-polar lipids. In an embodiment, the acyltransferase is a membrane-bound acyltransferase that uses an acyl-CoA substrate as the acyl donor in the case of DGAT, LPAAT, GPAT or MGAT, or an acyl group from PC as the acyl donor in the case of PDAT. The Pull modification can be relative to a corresponding wild-type plant or part thereof or, preferably, relative to a corresponding plant or part thereof which has the Push modification. In an embodiment, the plant or part thereof comprises an exogenous polynucleotide which encodes the fatty acyl acyltransferase. The “Pull” modification can also be achieved by increased expression of a PDCT, CPT or phospholipase C or D polypeptide which increases the production of DAG from PC.

[0779] C. The “Protect” modification is characterised by a reduction in the catabolism of triacylglycerols (TAG) in the plant or part thereof. In an embodiment, this can be achieved through a genetic modification in the plant or part thereof which down-regulates endogenous production and/or activity of a polypeptide involved in the catabolism of triacylglycerols (TAG) in the plant or part thereof when compared to a corresponding plant or part thereof lacking the genetic modification. In an embodiment, the plant or part thereof has a reduced expression and/or activity of an endogenous TAG lipase in the plant or part thereof, preferably an SDP1 lipase, a Cgi58 polypeptide, an acyl-CoA oxidase such as the ACX1 or ACX2, or a polypeptide involved in β-oxidation of fatty acids in the plant or part thereof such as a PXA1 peroxisomal ATP-binding cassette transporter. This may occur by expression in the plant or part thereof of an exogenous polynucleotide which encodes an RNA molecule which reduces the expression of, for example, an endogenous gene encoding the TAG lipase such as the SDP1 lipase, acyl-CoA oxidase or the polypeptide involved in β-oxidation of fatty acids in the plant or part thereof, or by a mutation in an endogenous gene encoding, for example, the TAG lipase, acyl-CoA oxidase or polypeptide involved in β-oxidation of fatty acids. In an embodiment, the reduced expression and/or activity is relative to a corresponding wild-type plant or part thereof or relative to a corresponding plant or part thereof which has the Push modification.

[0780] D. The “Package” modification is characterised by an increased expression and/or accumulation of an oil body coating (OBC) polypeptide. In an embodiment, this can be achieved by expressing in a transgenic plant or part thereof an exogenous polynucleotide which encodes an oil body coating (OBC) polypeptide. The OBC polypeptide may be an oleosin, such as for example a polyoleosin, a caoleosin or a steroleosin, or preferably an LDAP. In an embodiment, the level of oleosin that is accumulated in the plant or part thereof is at least 2-fold higher relative to the corresponding plant or part thereof comprising the oleosin gene from the T-DNA of pJP3502. In an embodiment, the increased expression or accumulation of the OBC polypeptide is not caused solely by the Push modification. In an embodiment, the expression and/or accumulation is relative to a corresponding wild-type plant or part thereof or, preferably, relative to a corresponding plant or part thereof which has the Push modification.

[0781] E. The “Plastidial Export” modification is characterised by an increased rate of export of total fatty acids out of the plastids of the plant or part thereof. In one embodiment, this can be achieved by expressing in a plant or part thereof an exogenous polynucleotide which encodes a polypeptide which increases the export of fatty acids out of plastids of the plant or part thereof when compared to a corresponding plant or part thereof lacking the exogenous polynucleotide. In an embodiment, this occurs by the increased expression and/or activity of a fatty acid thioesterase (TE), a fatty acid transporter polypeptide such as an ABCA9 polypeptide, or a long-chain acyl-CoA synthetase (LACS). In an embodiment, the plant or part thereof comprises an exogenous polynucleotide which encodes the TE, fatty acid transporter polypeptide or LACS. The TE may be a FATB polypeptide or preferably a FATA polypeptide. In an embodiment, the Plastidial Export modification is relative to a corresponding wild-type plant or part thereof or, preferably, relative to a corresponding plant or part thereof which has the Push modification.

[0782] F. The “Plastidial Import” modification is characterised by a reduced rate of import of fatty acids into the plastids of the plant or part thereof from outside of the plastids. In an embodiment, this can be achieved through a genetic modification in the plant or part thereof which down-regulates endogenous production and/or activity of a polypeptide involved in importing fatty acids into plastids of the plant or part thereof when compared to a corresponding plant or part thereof lacking the genetic modification. For example, this may occur by expression in the plant or part thereof of an exogenous polynucleotide which encodes an RNA molecule which reduces the expression of an endogenous gene encoding an transporter polypeptide such as a TGD polypeptide, for example a TGD1, TGD2, TGD3, TGD4 or preferably a TGD5 polypeptide, or by a mutation in an endogenous gene encoding the TGD polypeptide. In an embodiment, the reduced rate of import is relative to a corresponding wild-type plant or part thereof or relative to a corresponding plant or part thereof which has the Push modification.

[0783] G. The “Prokaryotic Pathway” modification is characterised by a decreased amount of DAG or rate of production of DAG in the plastids of the plant or part thereof. In an embodiment, this can be achieved through a genetic modification in the plant or part thereof which down-regulates endogenous production and/or activity of a polypeptide involved in diacylglycerol (DAG) production in the plastid when compared to a corresponding plant or part thereof lacking the genetic modification. In an embodiment, the decreased amount or rate of production of DAG occurs by a decreased production of LPA from acyl-ACP and G3P in the plastids. The decreased amount or rate of production of DAG may occur by expression in the plant or part thereof of an exogenous polynucleotide which encodes an RNA molecule which reduces the expression of an endogenous gene encoding a plastidial GPAT, plastidial LPAAT or a plastidial PAP, preferably a plastidial GPAT, or by a mutation in an endogenous gene encoding the plastidial polypeptide. In an embodiment, the decreased amount or rate of production of DAG is relative to a corresponding wild-type plant or part thereof or, preferably, relative to a corresponding plant or part thereof which has the Push modification.

[0784] The Push modification is highly desirable in the invention, and the Pull modification is preferred. The Protect and Package modifications may be complementary i.e. one of the two may be sufficient. The plant or part thereof may comprise one, two or all three of the Plastidial Export, Plastidial Import and Prokaryotic Pathway modifications. In an embodiment, at least one of the exogenous polynucleotides in the plant or part thereof, preferably at least the exogenous polynucleotide encoding the transcription factor which regulates fatty acid synthesis in the plastids, is expressed under the control of (H) a promoter other than a constitutive promoter such as, for example, a developmentally related promoter, a promoter that is preferentially active in photosynthetic cells, a tissue-specific promoter, a promoter which has been modified by reducing its expression level relative to a corresponding native promoter, or is preferably a senesence-specific promoter. More preferably, at least the exogenous polynucleotide encoding the transcription factor which regulates fatty acid synthesis in the plastids is expressed under the control of a promoter other than a constitutive promoter and the exogenous polynucleotide which encodes an RNA molecule which down-regulates endogenous production and/or activity of a polypeptide involved in the catabolism of triacylglycerols is also expressed under the control of a promoter other than a constitutive promoter, which promoters may be the same or different. Alternatively in monocotyledonous plants, the exogenous polynucleotide encoding the transcription factor which regulates fatty acid synthesis in the plastids is expressed under the control of a constitutive promoter such as, for example, a ubiquitin gene promoter or an actin gene promoter.

[0785] Plants produce some, but not all, of their membrane lipids such as MGDG in plastids by the so-called prokaryotic pathway (FIG. 1). In plants, there is also a eukaryotic pathway for synthesis of galactolipids and glycerolipids which synthesizes FA first of all in the plastid and then assembles the FA into glycerolipids in the ER. MGDG synthesised by the eukaryotic pathway contains C18:3 (ALA) fatty acid esterified at the sn-2 position of MGDG. The DAG backbone including the ALA for the MGDG synthesis by this pathway is assembled in the ER and then imported into the plastid. In contrast, the MGDG synthesized by the prokaryotic pathway contains C16:3 fatty acid esterified at the sn-2 position of MGDG. The ratio of the contribution of the prokaryotic pathway relative to the eukaryotic pathway in producing MGDG (16:3) vs MGDG (18:3) is a characteristic and distinctive feature of different plant species (Mongrand et al. 1998). This distinctive fatty acid composition of MGDG allows all higher plants (angiosperms) to be classified as either so-called 16:3 or 18:3 plants. 16:3 species, exemplified by Arabidopsis and Brassica napus, generally have both of the prokaryotic and eukaryotic pathways of MGDG synthesis operating, whereas the 18:3 species exemplified by Sorghum bicolor, Zea mays, Nicotiana tabacum, Pisum sativum and Glycine max generally have only (or almost entirely) the eukaryotic pathway of MGDG synthesis, providing little or no C16:3 fatty acid accumulation in the vegetative tissues. As used herein, a “16:3 plant” or “16:3 species” is one which has more than 2% C16:3 fatty acid in the total fatty acid content of its photosynthetic tissues. As used herein, a “18:3 plant” or “18:3 species” is one which has less than 2% C16:3 fatty acid in the total fatty acid content of its photosynthetic tissues. As described herein, a plant can be converted from being a 16:3 plant to an 18:3 plant by suitable genetic modifications. The proportion of flux between the prokaryote and eukaryote pathways is not conserved across different plant species or tissues. In 16:3 species up to 40% of flux in leaves occurs via the prokaryotic pathway (Browse et al., 1986), while in 18:3 species, such as pea and soybean, about 90% of FAs which are synthesized in the plastid are exported out of the plastid to the ER to supply the source of FA for the eukaryotic pathway (Ohlrogge and Browse, 1995; Somerville et al., 2000).

[0786] Therefore different amounts of 18:3 and 16:3 fatty acids are found within the glycolipids of different plant species. This is used to distinguish between 18:3 plants whose fatty acids with 3 double bonds are almost entirely C18 fatty acids and the 16:3 plants that contain both C16- and C18-fatty acids having 3 double bonds. In chloroplasts of 18:3 plants, enzymic activities catalyzing the conversion of phosphatidate to diacylglycerol and of diacylglycerol to monogalactosyl diacylglycerol (MGD) are significantly less active than in 16:3 chloroplasts. In leaves of 18:3 plants, chloroplasts synthesize stearoyl-ACP2 in the stroma, introduce the first double bond into the saturated hydrocarbon chain, and then hydrolyze the thioester by thioesterases (FIG. 1). Released oleate is exported across chloroplast envelopes into membranes of the cell, probably the endoplasmic reticulum, where it is incorporated into PC. PC-linked oleoyl groups are desaturated in these membranes and subsequently move back into the chloroplast. The MGD-linked acyl groups are substrates for the introduction of the third double bond to yield MGD with two linolenoyl residues. This galactolipid is characteristic of 18:3 plants such as Asteraceae and Fabaceae, for example. In photosynthetically active cells of 16:3 plants which are represented, for example, by members of Apiaceae and Brassicaceae, two pathways operate in parallel to provide thylakoids with MGD.

[0787] In one embodiment, the plant or part thereof such as a vegetative plant part of the invention produces higher levels of non-polar lipids such as TAG, or total fatty acid (TFA) content, preferably both, than a corresponding plant or part thereof such as a vegetative plant part which lacks the genetic modifications or exogenous polynucleotides. In one example, plants of the invention produce seeds, leaves, or have leaf portions of at least 1 cm² in surface area, stems and/or tubers having an increased non-polar lipid content such as TAG or TFA content, preferably both, when compared to corresponding seeds, leaves, leaf portions of at least 1 cm² in surface area, stems or tubers.

[0788] In another embodiment, the plant or part thereof such as a vegetative plant part, produce TAGs that are enriched for one or more particular fatty acids. A wide spectrum of fatty acids can be incorporated into TAGs, including saturated and unsaturated fatty acids and short-chain and long-chain fatty acids. Some non-limiting examples of fatty acids that can be incorporated into TAGs and which may be increased in level include: capric (10:0), lauric (12:0), myristic (14:0), palmitic (16:0), palmitoleic (16:1), stearic (18:0), oleic (18:1), vaccenic (18:1), linoleic (18:2), eleostearic (18:3), γ-linolenic (18:3), α-linolenic (18:30ω3), stearidonic (18:40ω3), arachidic (20:0), eicosadienoic (20:2), dihomo-γ-linoleic (20:3), eicosatrienoic (20:3), arachidonic (20:4), eicosatetraenoic (20:4), eicosapentaenoic (20:50ω3), behenic (22:0), docosapentaenoic (22:5ω), docosahexaenoic (22:60ω3), lignoceric (24:0), nervonic (24:1), cerotic (26:0), and montanic (28:0) fatty acids. In one embodiment of the present invention, the plant or part thereof is enriched for TAGs comprising oleic acid, and/or is reduced in linolenic acid (ALA), preferably by at least 2% or at least 5% on an absolute basis.

[0789] Preferably, the plant or part thereof such as a vegetative plant part of the invention is transformed with one or more exogenous polynucleotides such as chimeric DNAs. In the case of multiple chimeric DNAs, these are preferably covalently linked on one DNA molecule such as, for example, a single T-DNA molecule, and preferably integrated at a single locus in the host cell genome, preferably the host nuclear genome. Alternatively, the chimeric DNAs are on two or more DNA molecules which may be unlinked in the host genome, or the DNA molecule(s) is not integrated into the host genome, such as occurs in transient expression experiments. The plant or part thereof such as a vegetative plant part is preferably homozygous for the one DNA molecule inserted into its genome.

### Transcription Factors

[0790] Various transcription factors are involved in plant cells in the synthesis of fatty acids and lipids incorporating the fatty acids such as TAG, and therefore can be manipulated for the Push modification. A preferred transcription factor is WRI1. As used herein, the term “Wrinkled 1” or “WRI1” or “WRL1” refers to a transcription factor of the AP2/ERWEBP class which regulates the expression of several enzymes involved in glycolysis and de novo fatty acid biosynthesis. WRI1 has two plant-specific (AP2/EREB) DNA-binding domains. WRI1 in at least Arabidopsis also regulates the breakdown of sucrose via glycolysis thereby regulating the supply of precursors for fatty acid biosynthesis. In other words, it controls the carbon flow from the photosynthate to storage lipids. wri1 mutants in at least Arabidopsis have a wrinkled seed phenotype, due to a defect in the incorporation of sucrose and glucose into TAGs.

[0791] Examples of genes which are transcribed by WRI1 include, but are not limited to, one or more, preferably all, of genes encoding pyruvate kinase (At5g52920, At3g22960), pyruvate dehydrogenase (PDH) E1alpha subunit (At1g01090), acetyl-CoA carboxylase (ACCase), BCCP2 subunit (At5g15530), enoyl-ACP reductase (At2g05990; EAR), phosphoglycerate mutase (At1g22170), cytosolic fructokinase, and cytosolic phosphoglycerate mutase, sucrose synthase (SuSy) (see, for example, Liu et al., 2010; Baud et al., 2007; Ruuska et al., 2002).

[0792] WRI1 contains the conserved domain AP2 (cd00018). AP2 is a DNA-binding domain found in transcription regulators in plants such as APETALA2 and EREBP (ethylene responsive element binding protein). In EREBPs the domain specifically binds to the 11 bp GCC box of the ethylene response element (ERE), a promotor element essential for ethylene responsiveness. EREBPs and the C-repeat binding factor CBF1, which is involved in stress response, contain a single copy of the AP2 domain. APETALA2-like proteins, which play a role in plant development contain two copies.

[0793] Other sequence motifs which may be found in WRI1 and its functional homologs include:

(SEQ ID NO: 89)

1. R G V T/S R H R W T G R.

(SEQ ID NO: 90)

2. F/Y E A H L W D K.

(SEQ ID NO: 91)

3. D L A A L K Y W G.

(SEQ ID NO: 92)

4. S X G F S/A R G X.

(SEQ ID NO: 93)

5. H H H/Q N G R/K W E A R I G R/K V.

(SEQ ID NO: 94)

6. Q E E A A A X Y D.

[0794] As used herein, the term “Wrinkled 1” or “WRI1” also includes “Wrinkled 1-like” or “WRI1-like” proteins. Examples of WRI1 proteins include Accession Nos: Q6X5Y6, (Arabidopsis thaliana; SEQ ID NO:22), XP_002876251.1 (Arabidopsis lyrata subsp. Lyrata; SEQ ID NO:23), ABD16282.1 (Brassica napus; SEQ ID NO:24), AD016346.1 (Brassica napus; SEQ ID NO:25), XP_003530370.1 (Glycine max; SEQ ID NO:26), AE022131.1 (Jatropha curcas; SEQ ID NO:27), XP_002525305.1 (Ricinus communis; SEQ ID NO:28), XP_002316459.1 (Populus trichocarpa; SEQ ID NO:29), CBI29147.3 (Vitis vinifera; SEQ ID NO:30), XP_003578997.1 (Brachypodium distachyon; SEQ ID NO:31), BAJ86627.1 (Hordeum vulgare subsp. vulgare; SEQ ID NO:32), EAY79792.1 (Oryza sativa; SEQ ID NO:33), XP_002450194.1 (Sorghum bicolor; SEQ ID NO:34), ACG32367.1 (Zea mays; SEQ ID NO:35), XP_003561189.1 (Brachypodium distachyon; SEQ ID NO:36), ABL85061.1 (Brachypodium sylvaticum; SEQ ID NO:37), BAD68417.1 (Oryza sativa; SEQ ID NO:38), XP_002437819.1 (Sorghum bicolor; SEQ ID NO:39), XP_002441444.1 (Sorghum bicolor; SEQ ID NO:40), XP_003530686.1 (Glycine max; SEQ ID NO:41), XP_003553203.1 (Glycine max; SEQ ID NO:42), XP_002315794.1 (Populus trichocarpa; SEQ ID NO:43), XP_002270149.1 (Vitis vinifera; SEQ ID NO:44), XP_003533548.1 (Glycine max; SEQ ID NO:45), XP_003551723.1 (Glycine max; SEQ ID NO:46), XP_003621117.1 (Medicago truncatula; SEQ ID NO:47), XP_002323836.1 (Populus trichocarpa; SEQ ID NO:48), XP_002517474.1 (Ricinus communis; SEQ ID NO:49), CAN79925.1 (Vitis vinifera; SEQ ID NO:50), XP_003572236.1 (Brachypodium distachyon; SEQ ID NO:51), BAD10030.1 (Oryza sativa; SEQ ID NO:52), XP_002444429.1 (Sorghum bicolor; SEQ ID NO:53), NP_001170359.1 (Zea mays; SEQ ID NO:54), XP_002889265.1 (Arabidopsis lyrata subsp. lyrata; SEQ ID NO:55), AAF68121.1 (Arabidopsis thaliana; SEQ ID NO:56), NP_178088.2 (Arabidopsis thaliana; SEQ ID NO:57), XP_002890145.1 (Arabidopsis lyrata subsp. lyrata; SEQ ID NO:58), BAJ33872.1 (Thellungiella halophila; SEQ ID NO:59), NP_563990.1 (Arabidopsis thaliana; SEQ ID NO:60), XP_003530350.1 (Glycine max; SEQ ID NO:61), XP_003578142.1 (Brachypodium distachyon; SEQ ID NO:62), EAZ09147.1 (Oryza sativa; SEQ ID NO:63), XP_002460236.1 (Sorghum bicolor; SEQ ID NO:64), NP_001146338.1 (Zea mays; SEQ ID NO:65), XP_003519167.1 (Glycine max; SEQ ID NO:66), XP_003550676.1 (Glycine max; SEQ ID NO:67), XP_003610261.1 (Medicago truncatula; SEQ ID NO:68), XP_003524030.1 (Glycine max; SEQ ID NO:69), XP_003525949.1 (Glycine max; SEQ ID NO:70), XP_002325111.1 (Populus trichocarpa; SEQ ID NO:71), CBI36586.3 (Vitis vinifera; SEQ ID NO:72), XP_002273046.2 (Vitis vinifera; SEQ ID NO:73), XP_002303866.1 (Populus trichocarpa; SEQ ID NO:74), and CBI25261.3 (Vitis vinifera; SEQ ID NO:75). Further examples include Sorbi-WRL1 (SEQ ID NO:76), Lupan-WRL1 (SEQ ID NO:77), Ricco-WRL1 (SEQ ID NO:78), and Lupin angustifolius WRI1 (SEQ ID NO:79). A preferred WRI1 is a maize WRI1 or a sorghum WRI1.

[0795] More recently, a subset of WRI1-like transcription factors have been re-classified as WRI2, WRI3 or WRI4 transcription factors, which are characterised by preferential expression in stems and/or roots of plants rather than in developing seeds (To et al., 2012). Despite their re-classification, these are included in the definition of “WRI1” herein. Preferred WRI1-like transcription factors are those which can complement the function of a wri1 mutation in a plant, particularly the function in developing seed of the plant such as in an A. thaliana wri1 mutant. The function of a WRI1-like polypeptide can also be assayed in the N. benthamiana transient assays as described herein.

[0796] The WRI1 transcription factor may be endogenous to the plant or cell, or exogenous to the plant or cell, for example expressed from an exogenous polynucleotide. The WRI1 transcription factor may be a naturally occurring WRI1 polypeptide or a variant thereof, provided it retains transcription factor activity. The level or activity of an endogenous WRI1 polypeptide may also be increased by increased expression of a MED15 polypeptide (Kim et al., 2016), for example polypeptides whose amino acid sequences are provided as SEQ ID NOs:293 or 295, or of a 14-3-3 polypeptide (Ma et al., 2016), for example SEQ ID NOs:297-304. MED15 polypeptide is thought to assist in directing WRI1 to its target promoters and expression of WRI1 expression itself, while 14-3-3 polypeptides are thought to interact with WRI1 polypeptide to increase the WRI1 effect.

[0797] As used herein, a “LEAFY COTYLEDON” or “LEC” polypeptide means a transcription factor which is a LEC1, LEC1-like, LEC2, ABI3 or FUS3 transcription factor which exhibits broad control on seed maturation and fatty acid synthesis. LEC2, FUS3 and ABI3 are related polypeptides that each contain a B3 DNA-binding domain of 120 amino acids (Yamasaki et al., 2004) that is only found in plant proteins. They can be distinguished by phylogenetic analysis to determine relatedness in amino acid sequence to the members of the A. thaliana polypeptides having the Accession Nos as follows: LEC2, Accession No. AAL12004.1; FUS3 (also known as FUSCA3), Accession No. AAC35247. LEC1 belongs to a different class of polypeptides and is homologous to a HAP3 polypeptide of the CBF binding factor class (Lee et al., 2003). The LEC1, LEC2 and FUS3 genes are required in early embryogenesis to maintain embryonic cell fate and to specify cotyledon identity and in later in initiation and maintenance of embryo maturation (Santos-Mendoza et al., 2008). They also induce expression of genes encoding seed storage proteins by binding to RY motifs present in the promoters, and oleosin genes. They can also be distinguished by their expression patterns in seed development or by their ability to complement the corresponding mutation in A. thaliana.

[0798] As used herein, the term “Leafy Cotyledon 1” or “LEC1” refers to a NF-YB-type transcription factor which participates in zygotic development and in somatic embryogenesis. The endogenous gene is expressed specifically in seed in both the embryo and endosperm. LEC1 activates the gene encoding WRI1 as well as a large class of fatty acid synthesis genes. Ectopic expression of LEC2 also causes rapid activation of auxin-responsive genes and may cause formation of somatic embryos. Examples of LEC1 polypeptides include proteins from Arabidopsis thaliana (AAC39488, SEQ ID NO:149), Medicago truncatula (AFK49653, SEQ ID NO:154) and Brassica napus (ADF81045, SEQ ID NO:151), A. lyrata (XP_002862657, SEQ ID NO:150), R. communis (XP_002522740, SEQ ID NO:152), G. max (XP_006582823, SEQ ID NO:153), A. hypogaea (ADC33213, SEQ ID NO:156), Z. mays (AAK95562, SEQ ID NO:155).

[0799] LEC1-like (L1L) is closely related to LEC1 but has a different pattern of gene expression, being expressed earlier during embryogenesis (Kwong et al., 2003). Examples of LEC1-like polypeptides include proteins from Arabidopsis thaliana (AAN15924, SEQ ID NO:157), Brassica napus (AHI94922, SEQ ID NO:158), and Phaseolus coccineus LEC1-like (AAN01148, SEQ ID NO: 159).

[0800] As used herein, the term “Leafy Cotyledon 2” or “LEC2” refers to a B3 domain transcription factor which participates in zygotic development and in somatic embryogenesis and which activates expression of a gene encoding WRI1. Its ectopic expression facilitates the embryogenesis from vegetative plant tissues (Alemanno et al., 2008). Examples of LEC2 polypeptides include proteins from Arabidopsis thaliana (Accession No. NP_564304.1, SEQ ID NO:142), Medicago truncatula (Accession No. CAA42938.1, SEQ ID NO:143) and Brassica napus (Accession No. AD016343.1, SEQ ID NO:144).

[0801] In an embodiment, an exogenous polynucleotide of the invention which encodes a LEC2 comprises one or more of the following:

[0802] i) nucleotides encoding a polypeptide comprising amino acids whose sequence is set forth as any one of SEQ ID NOs:142 to 144, or a biologically active fragment thereof, or a polypeptide whose amino acid sequence is at least 30% identical to any one or more of SEQ ID NOs:142 to 144,

[0803] ii) nucleotides whose sequence is at least 30% identical to i), and

[0804] iii) a polynucleotide which hybridizes to one or both of i) or ii) under stringent conditions.

[0805] As used herein, the term “FUS3” refers to a B3 domain transcription factor which participates in zygotic development and in somatic embryogenesis and is detected mainly in the protodermal tissue of the embryo (Gazzarrini et al., 2004). Examples of FUS3 polypeptides include proteins from Arabidopsis thaliana (AAC35247, SEQ ID NO:160), Brassica napus (XP_006293066.1, SEQ ID NO:161) and Medicago truncatula (XP_003624470, SEQ ID NO:162). Over-expression of any of LEC1, L1L, LEC2, FUS3 and ABI3 from an exogenous polynucleotide is preferably controlled by a developmentally regulated promoter such as a senescence specific promoter, an inducible promoter, or a promoter which has been engineered for providing a reduced level of expression relative to a native promoter, particularly in plants other than Arabidopsis thaliana and B. napus cv. Westar, in order to avoid developmental abnormalities in plant development that are commonly associated with over-expression of these transcription factors (Mu et al., 2008).

[0806] As used herein, the term “BABY BOOM” or “BBM” refers an AP2/ERF transcription factor that induces regeneration under culture conditions that normally do not support regeneration in wild-type plants. Ectopic expression of Brassica napus BBM (BnBBM) genes in B. napus and Arabidopsis induces spontaneous somatic embryogenesis and organogenesis from seedlings grown on hormone-free basal medium (Boutilier et al., 2002). In tobacco, ectopic BBM expression is sufficient to induce adventitious shoot and root regeneration on basal medium, but exogenous cytokinin is required for somatic embryo (SE) formation (Srinivasan et al., 2007). Examples of BBM polypeptides include proteins from Arabidopsis thaliana (Accession No. NP_197245.2, SEQ ID NO:145), maize (U.S. Pat. No. 7,579,529), Sorghum bicolor (Accession No. XP_002458927) and Medicago truncatula (Accession No. AAW82334.1, SEQ ID NO:146).

[0807] In an embodiment, an exogenous polynucleotide of the invention which encodes BBM comprises, unless specified otherwise, one or more of the following:

[0808] i) nucleotides encoding a polypeptide comprising amino acids whose sequence is set forth as one of SEQ ID NOs:145 or 146, or a biologically active fragment thereof, or a polypeptide whose amino acid sequence is at least 30% identical to one or both of SEQ ID NOs: 145 or 146,

[0809] ii) nucleotides whose sequence is at least 30% identical to i), and

[0810] iii) a polynucleotide which hybridizes to one or both of i) or ii) under stringent conditions.

[0811] An ABI3 polypeptide (A. thaliana Accession No. NP_189108) is related to the maize VP1 protein, is expressed at low levels in vegetative tissues and affects plastid development. An ABI4 polypeptide (A. thaliana Accession NP_181551) belongs to a family of transcription factors that contain a plant-specific AP2 domain (Finkelstein et al., 1998) and acts downstream of ABI3. ABI5 (A. thaliana Accession No. NP_565840) is a transcription factor of the bZIP family which affects ABA sensitivity and controls the expression of some LEA genes in seeds. It binds to an ABA-responsive element.

[0812] Each of the following transcription factors was selected on the basis that they functioned in embryogenesis in plants. Accession numbers are provided in Table 26. Homologs of each can be readily identified in many other plant species and tested as described in Example 9.

[0813] MYB73 is a transcription factor that has been identified in soybean, involved in stress responses.

[0814] bZIP53 is a transcription factor in the bZIP protein family, identified in Arabidopsis.

[0815] AGL15 (Agamous-like 15) is a MADS box transcription factor which is natively expressed during embryogenesis. AGL15 is also natively expressed in leaf primordia, shoot apical meristems and young floral buds, suggesting that AGL15 may also have a function during post-germinative development. AGL15 has a role in embryogenesis and gibberellic acid catabolism. It targets B3 domain transcription factors that are key regulators of embryogenesis.

[0816] MYB115 and MYB118 are transcription factors in the MYB family from Arabidopsis involved in embryogenesis.

[0817] TANMEI also known as EMB2757 encodes a WD repeat protein required for embryo development in Arabidopsis.

[0818] WUS, also known as Wuschel, is a homeobox gene that controls the stem cell pool in embryos. It is expressed in the stem cell organizing center of meristems and is required to keep the stem cells in an undifferentiated state. The transcription factor binds to a TAAT element core motif.

[0819] GFR2a1 and GFR2a2 are transcription factors at least from soybean.

### Fatty Acyl Acyltransferases

[0820] As used herein, the term “fatty acyl acyltransferase” refers to a protein which is capable of transferring an acyl group from acyl-CoA, PC or acyl-ACP, preferably acyl-CoA or PC, onto a substrate to form TAG, DAG or MAG. These acyltransferases include DGAT, PDAT, MGAT, GPAT and LPAAT.

[0821] As used herein, the term “diacylglycerol acyltransferase” (DGAT) refers to a protein which transfers a fatty acyl group from acyl-CoA to a DAG substrate to produce TAG. Thus, the term “diacylglycerol acyltransferase activity” refers to the transfer of an acyl group from acyl-CoA to DAG to produce TAG. A DGAT may also have MGAT function but predominantly functions as a DGAT, i.e., it has greater catalytic activity as a DGAT than as a MGAT when the enzyme activity is expressed in units of nmoles product/min/mg protein (see for example, Yen et al., 2005). The activity of DGAT may be rate-limiting in TAG synthesis in seeds (Ichihara et al., 1988). DGAT uses an acyl-CoA substrate as the acyl donor and transfers it to the sn-3 position of DAG to form TAG. The enzyme functions in its native state in the endoplasmic reticulum (ER) of the cell.

[0822] There are three known types of DGAT, referred to as DGAT1, DGAT2 and DGAT3, respectively. DGAT1 polypeptides are membrane proteins that typically have 10 transmembrane domains, DGAT2 polypeptides are also membrane proteins but typically have 2 transmembrane domains, whilst DGAT3 polypeptides typically have none and are thought to be soluble in the cytoplasm, not integrated into membranes. Plant DGAT1 polypeptides typically have about 510-550 amino acid residues while DGAT2 polypeptides typically have about 310-330 residues. DGAT1 is the main enzyme responsible for producing TAG from DAG in most developing plant seeds, whereas DGAT2s from plant species such as tung tree (Vernicia fordii) and castor bean (Ricinus communis) that produce high amounts of unusual fatty acids appear to have important roles in the accumulation of the unusual fatty acids in TAG. Over-expression of AtDGAT1 in tobacco leaves resulted in a 6-7 fold increased TAG content (Bouvier-Nave et al., 2000).

[0823] Examples of DGAT1 polypeptides include DGAT1 proteins from Aspergillus fumigatus (XP_755172.1; SEQ ID NO:80), Arabidopsis thaliana (CAB44774.1; SEQ ID NO:1), Ricinus communis (AAR11479.1; SEQ ID NO:81), Vernicia fordii (ABC94472.1; SEQ ID NO:82), Vernonia galamensis (ABV21945.1 and ABV21946.1; SEQ ID NO:83 and SEQ ID NO:84, respectively), Euonymus alatus (AAV31083.1; SEQ ID NO:85), Caenorhabditis elegans (AAF82410.1; SEQ ID NO:86), Rattus norvegicus (NP_445889.1; SEQ ID NO:87), Homo sapiens (NP_036211.2; SEQ ID NO:88), as well as variants and/or mutants thereof. Examples of DGAT2 polypeptides include proteins encoded by DGAT2 genes from Arabidopsis thaliana (NP_566952.1; SEQ ID NO:2), Ricinus communis (AAY16324.1; SEQ ID NO:3), Vernicia fordii (ABC94474.1; SEQ ID NO:4), Mortierella ramanniana (AAK84179.1; SEQ ID NO:5), Homo sapiens (Q96PD7.2; SEQ ID NO:6) (Q58HT5.1; SEQ ID NO:7), Bos taurus (Q70VZ8.1; SEQ ID NO:8), Mus musculus (AAK84175.1; SEQ ID NO:9), as well as variants and/or mutants thereof. DGAT1 and DGAT2 amino acid sequences show little homology. Expression in leaves of an exogenous DGAT2 was twice as effective as a DGAT1 in increasing oil content (TAG). Further, A. thaliana DGAT2 had a greater preference for linoleoyl-CoA and linolenoyl-CoA as acyl donors relative to oleoyl-CoA, compared to DGAT1. This substrate preference can be used to distinguish the two DGAT classes in addition to their amino acid sequences.

[0824] Examples of DGAT3 polypeptides include proteins encoded by DGAT3 genes from peanut (Arachis hypogaea, Saha, et al., 2006), as well as variants and/or mutants thereof. A DGAT has little or no detectable MGAT activity, for example, less than 300 pmol/min/mg protein, preferably less than 200 pmol/min/mg protein, more preferably less than 100 pmol/min/mg protein.

[0825] In an embodiment, an exogenous polynucleotide of the invention which encodes a DGAT1 comprises one or more of the following:

[0826] i) nucleotides encoding a polypeptide comprising amino acids whose sequence is set forth as any one of SEQ ID NOs:1 or 80 to 88, or a biologically active fragment thereof, or a polypeptide whose amino acid sequence is at least 30% identical to any one or more of SEQ ID NOs: 1 or 80 to 88,

[0827] ii) nucleotides whose sequence is at least 30% identical to i), and

[0828] iii) a polynucleotide which hybridizes to one or both of i) or ii) under stringent conditions.

[0829] In an embodiment, an exogenous polynucleotide of the invention which encodes a DGAT2 comprises one or more of the following:

[0830] i) nucleotides encoding a polypeptide comprising amino acids whose sequence is set forth as any one of SEQ ID NOs:2 to 9, or a biologically active fragment thereof, or a polypeptide whose amino acid sequence is at least 30% identical to any one or more of SEQ ID NOs: 2 to 9,

[0831] ii) nucleotides whose sequence is at least 30% identical to i), and

[0832] iii) a polynucleotide which hybridizes to one or both of i) or ii) under stringent conditions.

[0833] As used herein, the term “phospholipid:diacylglycerol acyltransferase” (PDAT; EC 2.3.1.158) or its synonym “phospholipid:1,2-diacyl-sn-glycerol O-acyltransferase” means an acyltransferase that transfers an acyl group from a phospholipid, typically PC, to the sn-3 position of DAG to form TAG. This reaction is different to DGAT and uses phospholipids as the acyl-donors. Increased expression of PDAT such as PDAT1, which may be exogenous or endogenous to the cell or plant of the invention, increases the production of TAG from PC. There are several forms of PDAT in plant cells including PDAT1, PDAT2 or PDAT3 (Ghosal et al., 2007). Sequences of exemplary PDAT coding regions and polypeptides are provided herein as SEQ ID NOs:258-261 (Sorghum and Zea mays PDAT1, Accession Nos XM_002462417.1 and NM_001147943), (Dahlqvist et al., 2000; Fan et al., 2013; Fan et al., 2014) although any PDAT encoding gene can be used. The PDAT may be exogenous or endogenous to the plant or part thereof.

[0834] As used herein, the term “monoacylglycerol acyltransferase” or “MGAT” refers to a protein which transfers a fatty acyl group from acyl-CoA to a MAG substrate, for example sn-2 MAG, to produce DAG. Thus, the term “monoacylglycerol acyltransferase activity” at least refers to the transfer of an acyl group from acyl-CoA to MAG to produce DAG. The term “MGAT” as used herein includes enzymes that act on sn-1/3 MAG and/or sn-2 MAG substrates to form sn-1,3 DAG and/or sn-1,2/2,3-DAG, respectively. In a preferred embodiment, the MGAT has a preference for sn-2 MAG substrate relative to sn-1 MAG, or substantially uses only sn-2 MAG as substrate. As used herein, MGAT does not include enzymes which transfer an acyl group preferentially to LysoPA relative to MAG, such enzymes are known as LPAATs. That is, a MGAT preferentially uses non-phosphorylated monoacyl substrates, even though they may also have low catalytic activity on LysoPA. A preferred MGAT does not have detectable activity in acylating LysoPA. A MGAT may also have DGAT function but predominantly functions as a MGAT, i.e., it has greater catalytic activity as a MGAT than as a DGAT when the enzyme activity is expressed in units of nmoles product/min/mg protein (also see Yen et al., 2002). There are three known classes of MGAT, referred to as, MGAT1, MGAT2 and MGAT3, respectively. Examples of MGAT1, MGAT2 and MGAT3 polypeptides are described in WO2013/096993.

[0835] As used herein, an “MGAT pathway” refers to an anabolic pathway, different to the Kennedy pathway for the formation of TAG, in which DAG is formed by the acylation of either sn-1 MAG or preferably sn-2 MAG, catalysed by MGAT. The DAG may subsequently be used to form TAG or other lipids. WO2012/000026 demonstrated firstly that plant leaf tissue can synthesise MAG from G-3-P such that the MAG is accessible to an exogenous MGAT expressed in the leaf tissue, secondly MGAT from various sources can function in plant tissues, requiring a successful interaction with other plant factors involved in lipid synthesis and thirdly the DAG produced by the exogenous MGAT activity is accessible to a plant DGAT, or an exogenous DGAT, to produce TAG. MGAT and DGAT activity can be assayed by introducing constructs encoding the enzymes (or candidate enzymes) into Saccharomyces cerevisiae strain 111246 and demonstrating TAG accumulation.

[0836] Some of the motifs that have been shown to be important for catalytic activity in some DGAT2s are also conserved in MGAT acyltransferases. Of particular interest is a putative neutral lipid-binding domain with the concensus sequence FLXLXXXN (SEQ ID NO:14) where each X is independently any amino acid other than proline, and N is any nonpolar amino acid, located within the N-terminal transmembrane region followed by a putative glycerol/phospholipid acyltransferase domain. The FLXLXXXN motif (SEQ ID NO:14) is found in the mouse DGAT2 (amino acids 81-88) and MGAT1/2 but not in yeast or plant DGAT2s. It is important for activity of the mouse DGAT2. Other DGAT2 and/or MGAT1/2 sequence motifs include:

1. A highly conserved YFP tripeptide (SEQ ID NO:10) in most DGAT2 polypeptides and also in MGAT1 and MGAT2, for example, present as amino acids 139-141 in mouse DGAT2. Mutating this motif within the yeast DGAT2 with non-conservative substitutions rendered the enzyme non-functional.
2. HPHG tetrapeptide (SEQ ID NO:11), highly conserved in MGATs as well as in DGAT2 sequences from animals and fungi, for example, present as amino acids 161-164 in mouse DGAT2, and important for catalytic activity at least in yeast and mouse DGAT2. Plant DGAT2 acyltransferases have a EPHS (SEQ ID NO:12) conserved sequence instead, so conservative changes to the first and fourth amino acids can be tolerated.
3. A longer conserved motif which is part of the putative glycerol phospholipid domain. An example of this motif is RXGFX(K/R)XAXXXGXXX(L/V)VPXXXFG(E/Q) (SEQ ID NO:13), which is present as amino acids 304-327 in mouse DGAT2. This motif is less conserved in amino acid sequence than the others, as would be expected from its length, but homologs can be recognised by motif searching. The spacing may vary between the more conserved amino acids, i.e., there may be additional X amino acids within the motif, or less X amino acids compared to the sequence above.

[0837] One important component in glycerolipid synthesis from fatty acids esterified to ACP or CoA is the enzyme sn-glycerol-3-phosphate acyltransferase (GPAT), which is another of the polypeptides involved in the biosynthesis of non-polar lipids. This enzyme is involved in different metabolic pathways and physiological functions. It catalyses the following reaction: G3P+fatty acyl-ACP or -CoA→LPA+free-ACP or -CoA. The GPAT-catalyzed reaction occurs in three distinct plant subcellular compartments: plastid, endoplasmic reticulum (ER) and mitochondria. These reactions are catalyzed by three different types of GPAT enzymes, a soluble form localized in plastidial stroma which uses acyl-ACP as its natural acyl substrate (PGPAT in FIG. 1), and two membrane-bound forms localized in the ER and mitochondria which use acyl-CoA and acyl-ACP as natural acyl donors, respectively (Chen et al., 2011).

[0838] As used herein, the term “glycerol-3-phosphate acyltransferase” (GPAT; EC 2.3.1.15) and its synonym “glycerol-3-phosphate O-acyltransferase” refer to a protein which acylates glycerol-3-phosphate (G-3-P) to form LysoPA and/or MAG, the latter product forming if the GPAT also has phosphatase activity on LysoPA. The acyl group that is transferred is from acyl-CoA if the GPAT is an ER-type GPAT (an “acyl-CoA:sn-glycerol-3-phosphate 1-O-acyltransferase” also referred to as “microsomal GPAT”) or from acyl-ACP if the GPAT is a plastidial-type GPAT (PGPAT). Thus, the term “glycerol-3-phosphate acyltransferase activity” refers to the acylation of G-3-P to form LysoPA and/or MAG. The term “GPAT” encompasses enzymes that acylate G-3-P to form sn-1 LPA and/or sn-2 LPA, preferably sn-2 LPA. Preferably, the GPAT which may be over-expressed in the Pull modification is a membrane bound GPAT that functions in the ER of the cell, more preferably a GPAT9, and the plastidial GPAT that is down-regulated in the Prokaryotic Pathway modification is a soluble GPAT (“plastidial GPAT”). In a preferred embodiment, the GPAT has phosphatase activity. In a most preferred embodiment, the GPAT is a sn-2 GPAT having phosphatase activity which produces sn-2 MAG.

[0839] As used herein, the term “sn-1 glycerol-3-phosphate acyltransferase” (sn-1 GPAT) refers to a protein which acylates sn-glycerol-3-phosphate (G-3-P) to preferentially form 1-acyl-sn-glycerol-3-phosphate (sn-1 LPA). Thus, the term “sn-1 glycerol-3-phosphate acyltransferase activity” refers to the acylation of sn-glycerol-3-phosphate to form 1-acyl-sn-glycerol-3-phosphate (sn-1 LPA).

[0840] As used herein, the term “sn-2 glycerol-3-phosphate acyltransferase” (sn-2 GPAT) refers to a protein which acylates sn-glycerol-3-phosphate (G-3-P) to preferentially form 2-acyl-sn-glycerol-3-phosphate (sn-2 LPA). Thus, the term “sn-2 glycerol-3-phosphate acyltransferase activity” refers to the acylation of sn-glycerol-3-phosphate to form 2-acyl-sn-glycerol-3-phosphate (sn-2 LPA).

[0841] The GPAT family is large and all known members contain two conserved domains, a plsC acyltransferase domain (PF01553; SEQ ID NO:15) and a HAD-like hydrolase (PF12710; SEQ ID NO:16) superfamily domain and variants thereof. In addition to this, at least in Arabidopsis thaliana, GPATs in the subclasses GPAT4-GPAT8 all contain a N-terminal region homologous to a phosphoserine phosphatase domain (PF00702; SEQ ID NO:17), and GPATs which produce MAG as a product can be identified by the presence of such a homologous region. Some GPATs expressed endogenously in leaf tissue comprise the conserved amino acid sequence GDLVICPEGTTCREP (SEQ ID NO:18). GPAT4 and GPAT6 both contain conserved residues that are known to be critical to phosphatase activity, specifically conserved amino acids in Motif I (DXDX[T/V][L/V]; SEQ ID NO:19) and Motif III (K-[G/S][D/S]XXX[D/N]; SEQ ID NO:20) located at the N-terminus (Yang et al., 2010).

[0842] Homologues of Arabidopsis GPAT4 (Accession No. NP_171667.1) and GPAT6 (NP_181346.1) include AAF02784.1 (Arabidopsis thaliana), AAL32544.1 (Arabidopsis thaliana), AAP03413.1 (Oryza sativa), ABK25381.1 (Picea sitchensis), ACN34546.1 (Zea Mays), BAF00762.1 (Arabidopsis thaliana), BAH00933.1 (Oryza sativa), EAY84189.1 (Oryza sativa), EAY98245.1 (Oryza sativa), EAZ21484.1 (Oryza sativa), EEC71826.1 (Oryza sativa), EEC76137.1 (Oryza sativa), EEE59882.1 (Oryza sativa), EFJ08963.1 (Selaginella moellendorffii), EFJ11200.1 (Selaginella moellendorffii), NP_001044839.1 (Oryza sativa), NP_001045668.1 (Oryza sativa), NP_001147442.1 (Zea mays), NP_001149307.1 (Zea mays), NP_001168351.1 (Zea mays), AFH02724.1 (Brassica napus) NP_191950.2 (Arabidopsis thaliana), XP_001765001.1 (Physcomitrella patens), XP_001769671.1 (Physcomitrella patens), (Vitis vinifera), XP_002275348.1 (Vitis vinifera), XP_002276032.1 (Vitis vinifera), XP_002279091.1 (Vitis vinifera), XP_002309124.1 (Populus trichocarpa), XP_002309276.1 (Populus trichocarpa), XP_002322752.1 (Populus trichocarpa), XP_002323563.1 (Populus trichocarpa), XP_002439887.1 (Sorghum bicolor), XP_002458786.1 (Sorghum bicolor), XP_002463916.1 (Sorghum bicolor), XP_002464630.1 (Sorghum bicolor), XP_002511873.1 (Ricinus communis), XP_002517438.1 (Ricinus communis), XP_002520171.1 (Ricinus communis), ACT32032.1 (Vernicia fordii), NP_001051189.1 (Oryza sativa), AFH02725.1 (Brassica napus), XP_002320138.1 (Populus trichocarpa), XP_002451377.1 (Sorghum bicolor), XP_002531350.1 (Ricinus communis), and XP_002889361.1 (Arabidopsis lyrata).

[0843] The soluble plastidial GPATs (PGPAT, also known as ATS1 in Arabidopsis thaliana) have been purified and genes encoding them cloned from several plant species such as pea (Pisum sativum, Accession number: P30706.1), spinach (Spinacia oleracea, Accession number: Q43869.1), squash (Cucurbita moschate, Accession number: P10349.1), cucumber (Cucumis sativus, Accession number: Q39639.1) and Arabidopsis thaliana (Accession number: Q43307.2). The soluble plastidial GPAT is the first committed step for what is known as the prokaryotic pathway of glycerolipid synthesis and is operative only in the plastid (FIG. 1). The so-called prokaryotic pathway is located exclusively in plant plastids and assembles DAG for the synthesis of galactolipids (MGDG and DGMG) which contain C16:3 fatty acids esterified at the sn-2 position of the glycerol backbone.

[0844] Conserved motifs and/or residues can be used as a sequence-based diagnostic for the identification of GPAT enzymes. Alternatively, a more stringent function-based assay could be utilised. Such an assay involves, for example, feeding labelled glycerol-3-phosphate to cells or microsomes and quantifying the levels of labelled products by thin-layer chromatography or a similar technique. GPAT activity results in the production of labelled LPA whilst GPAT/phosphatase activity results in the production of labelled MAG.

[0845] As used herein, the term “lysophosphatidic acid acyltransferase” (LPAAT; EC 2.3.1.51) and its synonyms “1-acyl-glycerol-3-phosphate acyltransferase”, “acyl-CoA:1-acyl-sn-glycerol-3-phosphate 2-O-acyltransferase” and “1-acyl glycerol-3-phosphate O-acyltransferase” refer to a protein which acylates lysophosphatidic acid (LPA) to form phosphatidic acid (PA). The acyl group that is transferred is from acyl-CoA if the LPAAT is an ER-type LPAAT or from acyl-ACP if the LPAAT is a plastidial-type LPAAT (PLPAAT). Thus, the term “lysophosphatidic acid acyltransferase activity” refers to the acylation of LPA to form PA.

### Oil Body Coating Polypeptides

[0846] Plant seeds and pollen accumulate TAG in subcellular structures called oil bodies which generally range from 0.5-2.5 μm in diameter. As used herein, “lipid droplets”, also referred to as “oil bodies”, are lipid rich cellular organelles for storage or exchange of neutral lipids including predominantly TAG. Lipid droplets can vary greatly in size from about 20 nm to 100 μm. These organelles have a TAG core surround by a phospholipid monolayer containing several embedded proteins which are involved in lipid metabolism and storage as well as lipid trafficking to other membranes, including oleosins if the oil bodies are from plant seeds or floral tissues (Jolivet et al., 2004). They generally consist of 0.5-3.5% protein while the remainder is the lipid. They are the least dense of the organelles in most cells and can therefore be isolated readily by flotation centrifugation. Oleosins represent the most abundant (at least 80%) of the protein in the membrane of oil bodies from seeds.

[0847] In an embodiment, the oil body coating polypeptide is non-allergenic, or not known to be allergenic, such as to humans.

[0848] As used herein, the term “Oleosin” refers to an amphipathic protein present in the membrane of oil bodies in the storage tissues of seeds (see, for example, Huang, 1996; Tai et al., 2002; Lin et al., 2005; Capuano et al., 2007; Lui et al., 2009; Shimada and Hara-Nishimura, 2010) and artificially produced variants (see for example WO2011/053169 and WO2011/127118).

[0849] Oleosins are of low Mᵣ (15-26,000), corresponding to about 140-230 amino acid residues, which allows them to become tightly packed on the surface of oil bodies. Within each seed species, there are usually two or more oleosins of different Mᵣ. Each oleosin molecule contains a relatively hydrophilic, variable N-terminal domain (for example, about 48 amino acid residues), a central totally hydrophobic domain (for example, of about 70-80 amino acid residues) which is particularly rich in aliphatic amino acids such as alanine, glycine, leucine, isoleucine and valine, and an amphipathic α-helical domain of about 30-40 amino acid residues at or near the C-terminus. The central hydrophobic domain typically contains a proline knot motif of about 12 residues at its center. Generally, the central stretch of hydrophobic residues is inserted into the lipid core and the amphiphatic N-terminal and/or amphiphatic C-terminal are located at the surface of the oil bodies, with positively charged residues embedded in a phospholipid monolayer and the negatively charged ones exposed to the exterior.

[0850] As used herein, the term “Oleosin” encompasses polyoleosins which have multiple oleosin polypeptides fused together in a head-to-tail fashion as a single polypeptide (WO2007/045019), for example 2×, 4× or 6×oleosin peptides, and caleosins which bind calcium and which are a minor protein component of the proteins that coat oil bodies in seeds (Froissard et al., 2009), and steroleosins which bind sterols (WO2011/053169). However, generally a large proportion (at least 80%) of the oleosins of oil bodies will not be caleosins and/or steroleosins. The term “oleosin” also encompasses oleosin polypeptides which have been modified artificially, such oleosins which have one or more amino acid residues of the native oleosins artificially replaced with cysteine residues, as described in WO2011/053169. Typically, 4-8 residues are substituted artificially, preferably 6 residues, but as many as between 2 and 14 residues can be substituted. Preferably, both of the amphipathic N-terminal and C-terminal domains comprise cysteine substitutions. The modification increases the cross-linking ability of the oleosins and increases the thermal stability and/or the stability of the proteins against degradation by proteases.

[0851] A substantial number of oleosin protein sequences, and nucleotide sequences encoding therefor, are known from a large number of different plant species. Examples include, but are not limited to, oleosins from sesame, Arabidposis, canola, corn, rice, peanut, castor, soybean, flax, grape, cabbage, cotton, sunflower, sorghum and barley. Examples of oleosins (with their Accession Nos) include Brassica napus oleosin (CAA57545.1; SEQ ID NO:95), Brassica napus oleosin S1-1 (ACG69504.1; SEQ ID NO:96), Brassica napus oleosin S2-1 (ACG69503.1; SEQ ID NO:97), Brassica napus oleosin S3-1 (ACG69513.1; SEQ ID NO:98), Brassica napus oleosin S4-1 (ACG69507.1; SEQ ID NO:99), Brassica napus oleosin S5-1 (ACG69511.1; SEQ ID NO:100), Arachis hypogaea oleosin 1 (AAZ20276.1; SEQ ID NO:101), Arachis hypogaea oleosin 2 (AAU21500.1; SEQ ID NO:102), Arachis hypogaea oleosin 3 (AAU21501.1; SEQ ID NO:103), Arachis hypogaea oleosin 5 (ABC96763.1; SEQ ID NO:104), Ricinus communis oleosin 1 (EEF40948.1; SEQ ID NO:105), Ricinus communis oleosin 2 (EEF51616.1; SEQ ID NO:106), Glycine max oleosin isoform a (P29530.2; SEQ ID NO:107), Glycine max oleosin isoform b (P29531.1; SEQ ID NO:108), Linum usitatissimum oleosin low molecular weight isoform (ABB01622.1; SEQ ID NO:109), Linum usitatissimum oleosin high molecular weight isoform (ABB01624.1; SEQ ID NO:110), Helianthus annuus oleosin (CAA44224.1; SEQ ID NO:111), Zea mays oleosin (NP_001105338.1; SEQ ID NO:112), Brassica napus steroleosin (ABM30178.1; SEQ ID NO:113), Brassica napus steroleosin SLO1-1 (ACG69522.1; SEQ ID NO:114), Brassica napus steroleosin SLO2-1 (ACG69525.1; SEQ ID NO:115), Sesamum indicum steroleosin (AAL13315.1; SEQ ID NO:116), Sesame indicum OleosinL (Tai et al., 2002; Accession number AF091840; SEQ ID NO:305), Ficus pumila var. awkeotsang oleosin L-isoform (Accession No. ABQ57397.1; SEQ ID NO: 306), Cucumis sativus oleosinL (Accession No. XP_004146901.1; SEQ ID NO: 307), Linum usitatissimum oleosinL (Accession No. ABB01618.1; SEQ ID NO: 308), Glycine max oleosinL (Accession No. XP_003556321.2; SEQ ID NO: 309), Ananas comosus oleosinL (Accession No. OAY72596.1; SEQ ID NO: 310), Setaria italica oleosinL (Accession No. XP_004956407.1; SEQ ID NO: 311), Fragaria vesca subsp. vesca oleosinL (Accession No. XP_004307777.1; SEQ ID NO: 312), Brassica napus oleosinL (Accession No. CDY03377.1; SEQ ID NO: 313), Solanum lycopersicum oleosinL (Accession No. XP_004240765.1; SEQ ID NO: 314), Sesame indicum OleosinH1 (Tai et al., 2002; Accession number AF302807), Vanilla planifolia leaf OleosinU1 (Huang and Huang, 2016; Accession number SRX648194), Persea americana mesocarp OleosinM lipid droplet associated protein (Huang and Huang, 2016; Accession number SRX627420), Arachis hypogaea Oleosin 3 (Parthibane et al., 2012; Accession number AY722696), A. thaliana Caleosin3 (Shen et al., 2014; Laibach et al., 2015; Accession number AK317039), A. thaliana steroleosin (Accession number AT081653), Zea mays steroleosin (NP_001152614.1; SEQ ID NO:117), Brassica napus caleosin CLO-1 (ACG69529.1; SEQ ID NO:118), Brassica napus caleosin CLO-3 (ACG69527.1; SEQ ID NO:119), Sesamum indicum caleosin (AAF13743.1; SEQ ID NO:120), Zea mays caleosin (NP_001151906.1; SEQ ID NO:121), Glycine max caleosin (AAB71227). Other lipid encapsulation polypeptides that are functionally equivalent are plastoglobulins and MLDP polypeptides (WO2011/127118).

[0852] In an embodiment, an exogenous polynucleotide of the invention which encodes an oleosin comprises, unless specified otherwise, one or more of the following:

[0853] i) nucleotides encoding a polypeptide comprising amino acids whose sequence is set forth as any one of SEQ ID NOs:95 to 112 or 305 to 314, or a biologically active fragment thereof, or a polypeptide whose amino acid sequence is at least 30% identical to any one or more of SEQ ID NOs: 95 to 112 or 305 to 314,

[0854] ii) nucleotides whose sequence is at least 30% identical to i), and

[0855] iii) a polynucleotide which hybridizes to one or both of i) or ii) under stringent conditions.

[0856] In an embodiment, an exogenous polynucleotide of the invention which encodes a steroleosin comprises, unless specified otherwise, one or more of the following:

[0857] i) nucleotides encoding a polypeptide comprising amino acids whose sequence is set forth as any one of SEQ ID NOs:113 to 117, or a biologically active fragment thereof, or a polypeptide whose amino acid sequence is at least 30% identical to any one or more of SEQ ID NOs: 113 to 117,

[0858] ii) nucleotides whose sequence is at least 30% identical to i), and

[0859] iii) a polynucleotide which hybridizes to one or both of i) or ii) under stringent conditions.

[0860] In an embodiment, the oleosin is oleosinL or an ortholog thereof. OleosinL lacks the about 18 amino acid H-form insertion towards the C-terminus of other oleosins (see, for example, Tai et al., 2002). Thus, OleosinL's can readily be distinguished from other oleosins based on protein alignment.

[0861] In an embodiment, an exogenous polynucleotide of the invention which encodes an oleosinL comprises, unless specified otherwise, one or more of the following:

[0862] i) nucleotides encoding a polypeptide comprising amino acids whose sequence is set forth as any one of SEQ ID NOs: 305 to 314, or a biologically active fragment thereof, or a polypeptide whose amino acid sequence is at least 30% identical to any one or more of SEQ ID NOs: 305 to 314,

[0863] ii) nucleotides whose sequence is at least 30% identical to i), and

[0864] iii) a polynucleotide which hybridizes to one or both of i) or ii) under stringent conditions. In an alternate embodiment, an exogenous polynucleotide of the invention which encodes an oleosin comprises, unless specified otherwise, one or more of the following:

[0865] i) nucleotides encoding a polypeptide comprising amino acids whose sequence is set forth as any one of SEQ ID NOs: 306 to 314, or a biologically active fragment thereof, or a polypeptide whose amino acid sequence is at least 30% identical to any one or more of SEQ ID NOs: 306 to 314,

[0866] ii) nucleotides whose sequence is at least 30% identical to i), and

[0867] iii) a polynucleotide which hybridizes to one or both of i) or ii) under stringent conditions, wherein the oleosin is not allergenic, or not known to be allergenic, such as to humans.

[0868] As used herein, a “lipid droplet associated protein” or “LDAP” means a polypeptide which is associated with lipid droplets in plants in tissues or organs other than seeds, anthers and pollen, such as fruit tissues including pericarp and mesocarp. LDAPs may be associated with oil bodies in seeds, anthers or pollen as well as in the tissues or organs other than seeds, anthers and pollen. They are distinct from oleosins which are polypeptides associated with the surface of lipid droplets in seed tissues, anthers and pollen. LDAPs as used herein include LDAP polypeptides that are produced naturally in plant tissues as well as amino acid sequence variants that are produced artificially. The function of such variants can be tested as exemplified in Example 11.

[0869] Horn et al. (2013) identified two LDAP genes which are expressed in avocado pericarp. The encoded avocado LDAP1 and LDAP2 polypeptides were 62% identical in amino acid sequence and had homology to polypeptide encoded by Arabidopsis At3g05500 and a rubber tree SRPP-like protein. Gidda et al. (2013) identified three LDAP genes that were expressed in oil palm (Elaeis guineensis) mesocarp but not in kernels and concluded that LDAP genes were plant specific and conserved amongst all plant species. LDAP polypeptides may contain additional domains (Gidda et al., (2013). Genes encoding LDAPs are generally up-regulated in non-seed tissues with abundant lipid and can be identified thereby, but are thought to be expressed in all non-seed cells that produce oil including for transient storage. Horn et al. (2013) shows a phylogenetic tree of SRPP-like proteins in plants. Exemplary LDAP polypeptides are described in Example 11 and Example 17 herein, such as Rhodococcus opacus TadA lipid droplet associated protein (MacEachran et al., 2010; Accession number HM625859), Nannochloropsis oceanica LSDP oil body protein (Vieler et al., 2012; Accession number JQ268559) and Trichoderma reesei HFBI hydrophobin (Linder et al., 2005; Accession number Z68124). Homologs of LDAPs in other plant species can be readily identified by those skilled in the art.

[0870] In an embodiment, an exogenous polynucleotide of the invention which encodes a LDAP comprises, unless specified otherwise, one or more of the following:

[0871] i) nucleotides encoding a polypeptide comprising amino acids whose sequence is set forth as any one of SEQ ID NOs: 228, 230 or 232, or a biologically active fragment thereof, or a polypeptide whose amino acid sequence is at least 30% identical to any one or more of SEQ ID NOs: 228, 230 or 232,

[0872] ii) nucleotides whose sequence is at least 30% identical to i), and

[0873] iii) a polynucleotide which hybridizes to one or both of i) or ii) under stringent conditions.

[0874] As used herein, the term a “polypeptide involved in starch biosynthesis” refers to any polypeptide, the downregulation of which in a plant cell below normal (wild-type) levels results in a reduction in the level of starch synthesis and a decrease in the levels of starch. This reduces the flow of carbon from sugars into starch. An example of such a polypeptide is AGPase.

[0875] As used herein, the term “ADP-glucose phosphorylase” or “AGPase” refers to an enzyme which regulates starch biosynthesis, catalysing conversion of glucose-1-phosphate and ATP to ADP-glucose which serves as the building block for starch polymers. The active form of the AGPase enzyme consists of 2 large and 2 small subunits.

[0876] The AGPase enzyme in plants exists primarily as a tetramer which consists of 2 large and 2 small subunits. Although these subunits differ in their catalytic and regulatory roles depending on the species (Kuhn et al., 2009), in plants the small subunit generally displays catalytic activity. The molecular weight of the small subunit is approximately 50-55 kDa. Sequences of exemplary AGPase small subunit polypeptides are provided herein as SEQ ID NOs:254-257 (Sorghum and Zea mays AGPase, Accession Nos XM_002462095.1 and XM_008666513.1) (Sanjaya et al. 2011, Zale et al. 2016). The molecular weight of the large large subunit is approximately 55-60 kDa. The plant enzyme is strongly activated by 3-phosphoglycerate (PGA), a product of carbon dioxide fixation; in the absence of PGA, the enzyme exhibits only about 3% of its activity. Plant AGPase is also strongly inhibited by inorganic phosphate (Pi). In contrast, bacterial and algal AGPase exist as homotetramers of 50 kDa. The algal enzyme, like its plant counterpart, is activated by PGA and inhibited by Pi, whereas the bacterial enzyme is activated by fructose-1, 6-bisphosphate (FBP) and inhibited by AMP and Pi.

### TAG Lipases and Beta-Oxidation

[0877] As used herein, the term “polypeptide involved in the degradation of lipid and/or which reduces lipid content” refers to any polypeptide which catabolises lipid, the downregulation of which in a plant cell below normal (wild-type) levels results an increase in the level of oil, such as fatty acids and/or TAGs, in a cell of a transgenic plant or part thereof such as a vegetative part, tuber, beet or a seed. Examples of such polypeptides include, but are not limited to, lipases, or a lipase such as a CGi58 (Comparative Gene identifier-58-Like) polypeptide, a SUGAR-DEPENDENT1 (SDP1) triacylglycerol lipase (see, for example, Kelly et al., 2011) and a lipase described in WO 2009/027335.

[0878] As used herein, the term “TAG lipase” (EC.3.1.1.3) refers to a protein which hydrolyzes TAG into one or more fatty acids and any one of DAG, MAG or glycerol. Thus, the term “TAG lipase activity” refers to the hydrolysis of TAG into glycerol and fatty acids.

[0879] As used herein, the term “CGi58” refers to a soluble acyl-CoA-dependent lysophosphatidic acid acyltransferase encoded by the At4g24160 gene in Arabidopsis thaliana and its homologs in other plants and “Ict1p” in yeast and its homologs. The plant gene such as that from Arabidopsis gene locus At4g24160 is expressed as two alternative transcripts: a longer full-length isoform (At4g24160.1) and a smaller isoform (At4g24160.2) missing a portion of the 3′ end (see James et al., 2010; Ghosh et al., 2009; US 201000221400). Both mRNAs code for a protein that is homologous to the human CGI-58 protein and other orthologous members of this α/β hydrolase family (ABHD). In an embodiment, the CGI58 (At4g24160) protein contains three motifs that are conserved across plant species: a GXSXG lipase motif (SEQ ID NO:127), a HX(4)D acyltransferase motif (SEQ ID NO:128), and VX(3)HGF, a probable lipid binding motif (SEQ ID NO:129). The human CGI-58 protein has lysophosphatidic acid acyltransferase (LPAAT) activity but not lipase activity. In contrast, the plant and yeast proteins possess a canonical lipase sequence motif GXSXG (SEQ ID NO:127), that is absent from vertebrate (humans, mice, and zebrafish) proteins, and have lipase and phospholipase activity (Ghosh et al., 2009). Although the plant and yeast CGI58 proteins appear to possess detectable amounts of TAG lipase and phospholipase A activities in addition to LPAAT activity, the human protein does not.

[0880] Disruption of the homologous CGI-58 gene in Arabidopsis thaliana results in the accumulation of neutral lipid droplets in mature leaves. Mass spectroscopy of isolated lipid droplets from cgi-58 loss-of-function mutants showed they contain triacylglycerols with common leaf-specific fatty acids. Leaves of mature cgi-58 plants exhibit a marked increase in absolute triacylglycerol levels, more than 10-fold higher than in wild-type plants. Lipid levels in the oil-storing seeds of cgi-58 loss-of-function plants were unchanged, and unlike mutations in β-oxidation, the cgi-58 seeds germinated and grew normally, requiring no rescue with sucrose (James et al., 2010).

[0881] Examples of nucleotides encoding CGi58 polypeptides include those from Arabidopsis thaliana (NM_118548.1 encoding NP_194147.2; SEQ ID NO:130), Brachypodium distachyon (XP_003578450.1; SEQ ID NO:131), Glycine max (XM_003523590.1 encoding XP_003523638.1; SEQ ID NO:132), Zea mays (NM_001155541.1 encoding NP_001149013.1; SEQ ID NO:133), Sorghum bicolor (XM_002460493.1 encoding XP_002460538.1; SEQ ID NO:134), Ricinus communis (XM_002510439.1 encoding XP_002510485.1; SEQ ID NO:135), Medicago truncatula (XM_003603685.1 encoding XP_003603733.1; SEQ ID NO:136), and Oryza sativa (encoding EAZ09782.1).

[0882] In an embodiment, a genetic modification of the invention down-regulates endogenous production of CGi58, wherein CGi58 is encoded by one or more of the following:

[0883] i) nucleotides comprising a sequence set forth as any one of SEQ ID NOs:130 to 136,

[0884] ii) nucleotides comprising a sequence which is at least 30% identical to any one or more of SEQ ID NOs:130 to 136, and

[0885] iii) a polynucleotide which hybridizes to one or both of i) or ii) under stringent conditions.

[0886] Other lipases which have lipase activity on TAG include SUGAR-DEPENDENT1 triacylglycerol lipase (SDP1, see for example Eastmond et al., 2006; Kelly et al., 2011) and SDP1-like polypeptides found in plant species as well as yeast (TGL4 polypeptide) and animal cells, which are involved in storage TAG breakdown. The SDP1 and SDP1-like polypeptides appear to be responsible for initiating TAG breakdown in seeds following germination (Eastmond et al., 2006). Plants that are mutant in SDP1, in the absence of exogenous WRI1 and DGAT1, exhibit increased levels of PUFA in their TAG. As used herein, “SDP1 polypeptides” include SDP1 polypeptides, SDP1-like polypeptides and their homologs in plant species. SDP1 and SDP1-like polypeptides in plants are 800-910 amino acid residues in length and have a patatin-like acylhydrolase domain that can associate with oil body surfaces and hydrolyse TAG in preference to DAG or MAG. SDP1 is thought to have a preference for hydrolysing the acyl group at the sn-2 position of TAG. Arabidopsis contains at least three genes encoding SDP1 lipases, namely SDP1 (Accession No. NP_196024, nucleotide sequence SEQ ID NO:163 and homologs in other species), SDP1L (Accession No. NM_202720 and homologs in other species, Kelly et al., 2011) and ATGLL (At1g33270) (Eastmond et al, 2006). Of particular interest for reducing gene activity are SDP1 genes which are expressed in vegetative tissues in plants, such as in leaves, stems and roots. Levels of non-polar lipids in vegetative plant parts can therefore be increased by reducing the activity of SDP1 polypeptides in the plant parts, for example by either mutation of an endogenous gene encoding a SDP1 polypeptide or introduction of an exogenous gene which encodes a silencing RNA molecule which reduces the expression of an endogenous SDP1 gene. Such a reduction is of particular benefit in tuber crops such as sugarbeet and potato, and in “high sucrose” plants such as sweet sorghum, sugarcane and and sugarbeet.

[0887] Genes encoding SDP1 homologues (including SDP1-like homologues) in a plant species of choice can be identified readily by homology to known SDP1 gene sequences. Known SDP1 nucleotide or amino acid sequences include Accession Nos.: in Brassica napus, GN078290 (SEQ ID NO:164), GN078281, GN078283; Capsella rubella, XP_006287072; Theobroma cacao, XP_007028574.1; Populus trichocarpa, XP_002308909 (SEQ ID NO:166); Prunus persica, XP_007203312; Prunus mume, XP_008240737; Malus domestica, XP_008373034; Ricinus communis, XP_002530081; Medicago truncatula, XP_003591425 (SEQ ID NO:167); Solanum lycopersicum, XP_004249208; Phaseolus vulgaris, XP_007162133; Glycine max, XP_003554141 (SEQ ID NO:168); Solanum tuberosum, XP_006351284; Glycine max, XP_003521151; Cicer arietinum, XP_004493431; Cucumis sativus, XP_004142709; Cucumis melo, XP_008457586; Jatropha curcas, KDP26217; Vitis vinifera, CBI30074; Oryza sativa, Japonica Group BAB61223; Oryza sativa, Indica Group EAY75912; Oryza sativa, Japonica Group NP_001044325; Sorghum bicolor, XP_002458531 (SEQ ID NO:169); Brachypodium distachyon, XP_003567139 (SEQ ID NO:165); Zea mays, AFW85009; Hordeum vulgare, BAK03290 (SEQ ID NO:172); Aegilops tauschii, EMT32802; Sorghum bicolor, XP_002463665; Zea mays, NP_001168677 (SEQ ID NO:170); Hordeum vulgare, BAK01155; Aegilops tauschii, EMT02623; Triticum urartu, EMS67257; Physcomitrella patens, XP_001758169 (SEQ ID NO:171). Preferred SDP1 sequences for use in genetic constructs for inhibiting expression of the endogenous genes are from cDNAs corresponding to the genes which are expressed most highly in the plant cells, vegetative plant parts or the seeds, whichever is to be modified. Nucleotide sequences which are highly conserved between cDNAs corresponding to all of the SDP1 genes in a plant species are preferred if it is desired to reduce the activity of all members of a gene family in that species.

[0888] In an embodiment, a genetic modification of the invention down-regulates endogenous production of SDP1, wherein SDP1 is encoded by one or more of the following:

[0889] i) nucleotides whose sequence is set forth as any one of SEQ ID NOs:163 to 174,

[0890] ii) nucleotides whose sequence is at least 30% identical to any one or more of the sequences set forth as SEQ ID NOs:163 to 174, and

[0891] iii) a sequence of nucleotides which hybridizes to one or both of i) or ii) under stringent conditions.

[0892] As shown in the Examples, reduction of the expression and/or activity of SDP1 TAG lipase in plant leaves greatly increased the TAG content, both in terms of the amount of TAG that accumulated and the earlier timing of accumulation during plant development, in the context of co-expression of the transcription factor WRI1 and a fatty acyl acyltransferase. In particular, the increase was observed in plants prior to flowering, and was up to about 70% on a weight basis (% dry weight) at the onset of senescence. The increase was relative to the TAG levels observed in corresponding plant leaves transformed with exogenous polynucleotides encoding the WRI1 and fatty acyl acyltransferase but lacking the modification that reduced SDP1 expression and/or activity.

[0893] Reducing the expression of other TAG catabolism genes in plant parts can also increase TAG content, such as the ACX genes encoding acyl-CoA oxidases such as the Acx1 (At4g16760 and homologs in other plant species) or Acx2 (At5g65110 and homologs in other plant species) genes. Another polypeptide involved in lipid catabolism is PXA1 which is a peroxisomal ATP-binding cassette transporter that is requires for fatty acid import for β-oxidation (Zolman et al. 2001).

Export of Fatty Acids from Plastids

[0894] As used herein, the term “polypeptide which increases the export of fatty acids out of plastids of the cell” refers to any polypeptide which aids in fatty acids being transferred from within plastids of plant cells in a plant or part thereof to outside the plastid, which may be any other part of the cell such as for example the endoplasmic reticulum (ER). Examples of such polypeptides include, but are not limited to, a C16 or C18 fatty acid thioesterase such as a FATA polypeptide or a FATB polypeptide, a C8 to C14 fatty acid thioesterase (which is also a FATB polypeptide), a fatty acid transporter such as an ABCA9 polypeptide or a long-chain acyl-CoA synthetase (LACS).

[0895] As used herein, the term “fatty acid thioesterase” or “FAT” or “acyl-ACP thioesterase” refers to an enzyme which catalyses the hydrolysis of the thioester bond between an acyl moiety and acyl carrier protein (ACP) in acyl-ACP and the release of a free fatty acid. Such enzymes typically function in the plastids of an organism which is synthesizing de novo fatty acids. As used herein, the term “C16 or C18 fatty acid thioesterase” refers to an enzyme which catalyses the hydrolysis of the thioester bond between a C16 and/or C18 acyl moiety and ACP in acyl-ACP and the release of free C16 or C18 fatty acid in the plastid. The free fatty acid is then re-esterified to CoA in the plastid envelope as it is transported out of the plastid. The substrate specificity of the fatty acid thioesterase (FAT) enzyme in the plastid is involved in determining the spectrum of chain length and degree of saturation of the fatty acids exported from the plastid. FAT enzymes can be classified into two classes based on their substrate specificity and nucleotide sequences, FATA and FATB (EC 3.1.2.14) (Jones et al., 1995). FATA polypeptides prefer oleoyl-ACP as substrate, while FATB polypeptides show higher activity towards saturated acyl-ACPs of different chain lengths such as acting on palmitoyl-ACP to produce free palmitic acid. Examples of FATA polypeptides useful for the invention include, but are not limited to, those from Arabidopsis thaliana (NP_189147), Arachis hypogaea (GU324446), Helianthus annuus (AAL79361), Carthamus tinctorius (AAA33020), Monrus notabilis (XP_010104178.1), Brassica napus (CDX77369.1), Ricinus communis (XP_002532744.1) and Camelina sativa (AFQ60946.1). Examples of FATB polypeptides useful for the invention include, but are not limited to, those from Zea mays (AIL28766), Brassica napus (ABH11710), Helianthus annuus (AAX19387), Arabidopsis thaliana (AEE28300), Umbellularia californica (AAC49001), Arachis hypogaea (AFR54500), Ricinus communis (EEF47013) and Brachypodium sylvaticum (ABL85052.1).

[0896] As used herein, the term “fatty acid transporter” relates to a polypeptide present in the plastid membrane which is involved in actively transferring fatty acids from a plastid to outside the plastid. Examples of ABCA9 (ABC transporter A family member 9) polypeptides useful for the invention include, but are not limited to, those from Arabidopsis thaliana (Q9FLT5), Capsella rubella (XP_006279962.1), Arabis alpine (KFK27923.1), Camelina sativa (XP_010457652.1), Brassica napus (CDY23040.1) and Brassica rapa (XP_009136512.1).

[0897] As used herein, the term “acyl-CoA synthetase” or “ACS” (EC 6.2.1.3) means a polypeptide which is a member of a ligase family that catalyzes the formation of fatty acyl-CoA by a two-step process proceeding through an adenylated intermediate, using a non-esterified fatty acid, CoA and ATP as substrates to produce an acyl-CoA ester, AMP and pyrophosphate as products. As used herein, the term “long-chain acyl-CoA synthetase” (LACS) is an ACS that has activity on at least a C18 free fatty acid substrate although it may have broader activity on any of C14-C20 free fatty acids. The endogenous plastidial LACS enzymes are localised in the outer membrane of the plastid and function with fatty acid thioesterase for the export of fatty acids from the plastid (Schnurr et al., 2002). In Arabidopsis, there are at least nine identified LACS genes (Shockey et al., 2002). Preferred LACS polypeptides are of the LACS9 subclass, which in Arabidopsis is the major plastidial LACS. Examples of LACS polypeptides useful for the invention include, but are not limited to, those from Arabidopsis thaliana (Q9CAP8), Camelina sativa (XP_010416710.1), Capsella rubella (XP_006301059.1), Brassica napus (CDX79212.1), Brassica rapa (XP_009104618.1), Gossypium raimondii (XP_012450538.1) and Vitis Vinifera (XP_002285853.1). Homologs of the above mentioned polypeptides in other species can readily be identified by those skilled in the art.

### Polypeptides Involved in Diacylglycerol (DAG) Production

[0898] Levels of non-polar lipids in, for example, vegetative plant parts can also be increased by reducing the activity of polypeptides involved in diacylglycerol (DAG) production in the plastid in the plant parts, for example by either mutation of an endogenous gene encoding such a polypeptide or introduction of an exogenous gene which encodes a silencing RNA molecule which reduces the expression of a target gene involved in diacylglycerol (DAG) production in the plastid.

[0899] As used herein, the term “polypeptide involved in diacylglycerol (DAG) production in the plastid” refers to any polypeptide in the plastid of plant cells in a plant or part thereof that is directly involved in the synthesis of diacylglycerol. Examples of such polypeptides include, but are not limited to, a plastidial GPAT, a plastidial LPAAT or a plastidial PAP.

[0900] GPATs are described elsewhere in the present document. Examples of plastidial GPAT polypeptides which can be targeted for down-regulation in the invention include, but are not limited to, those from Arabidopsis thaliana (BAA00575), Capsella rubella (XP_006306544.1), Camelina sativa (010499766.1), Brassica napus (CDY43010.1), Brassica rapa (XP_009145198.1), Helianthus annuus (ADV16382.1) and Citrus unshiu (BAB79529.1). Homologs in other species can readily be identified by those skilled in the art.

[0901] LPAATs are described elsewhere in the present document. As the skilled person would appreciate, plastidial LPAATs to be targeted for down-regulation for reducing DAG synthesis in the plastid are not endogenous LPAATs which function outside of the plastid such as those in the ER, for example being useful for producing TAG comprising medium chain length fatty acids. Examples of plastidial LPAAT polypeptides which can be targeted for down-regulation in the invention include, but are not limited to, those from Brassica napus (ABQ42862), Brassica rapa (XP_009137939.1), Arabidopsis thaliana (NP_194787.2), Camelina sativa (XP_010432969.1), Glycine max (XP_006592638.1) and Solanum tuberosum (XP_006343651.1). Homologs in other species of the above mentioned polypeptides can readily be identified by those skilled in the art.

[0902] As used herein, the term “phosphatidic acid phosphatase” (PAP) (EC 3.1.3.4) refers to a protein which hydrolyses the phosphate group on 3-sn-phosphatidate to produce 1,2-diacyl-sn-glycerol (DAG) and phosphate. Examples of plastidial PAP polypeptides which can be targeted for down-regulation in the invention include, but are not limited to, those from Arabidopsis thaliana (Q6NLA5), Capsella rubella (XP_006288605.1), Camelina sativa (XP_010452170.1), Brassica napus (CDY10405.1), Brassica rapa (XP_009122733.1), Glycine max (XP_003542504.1) and Solanum tuberosum (XP_006361792.1). Homologs in other species of the above mentioned polypeptides can readily be identified by those skilled in the art.

[0903] Another enzyme that results in DAG production, but in the ER rather than the plastid, is PDCT. As used herein, the term “phosphatidylcholine:diacylglycerol cholinephosphotransferase” (PDCT; EC 2.7.8.2) means an cholinephosphotransferase that transfers a phospho-choline headgroup from a phospholipid, typically PC, to produce DAG, or the reverse reaction to produce PC from DAG. Thus, the two substrates of the forward reaction are cytidine monophosphate (CMP) and phosphatidylcholine and the two products are CDP-choline and DAG. PDCT belongs to the phosphatidic acid phosphatase-related protein family and typically possesses lipid phosphatase/phosphotransferase (LPT) domains. In Arabidopsis thaliana, PDCT is encoded by the ROD1 (At3g15820) and ROD2 (At3g15830) genes (Lu et al., 2009). Homologous genes are readily identified in other plant species (Guan et al., 2015). Sequences of exemplary PDCT coding regions and polypeptides are provided herein as SEQ ID NOs:262-265 (Sorghum and Zea mays PDCT, Accession Nos XM_002437214 and EU973573.1), although any PDCT encoding gene can be used. In an embodiment, the PDCT is other than A. thaliana PDCT (Lu et al., 2009). Increased expression of PDCT, which may be exogenous or endogenous to the cell or plant of the invention and which is preferably expressed from an exogenous polynucleotide, increases the flow of esterified acyl groups from PC to DAG and thereby increases the TTQ in the total fatty acid content and the level of TAG in vegetative plant parts or cells of the invention. Alternatively, decreasing the level of PDCT activity in the cell or plant by mutation in the gene or by a silencing RNA molecule reduces the production of PC from DAG, the reverse PDCT reaction.

Import of Fatty Acids into Plastids

[0904] Levels of non-polar lipids in vegetative plant parts can also be increased by reducing the activity of TGD polypeptides in the plant parts, for example by either mutation of an endogenous gene encoding a TGD polypeptide or introduction of an exogenous gene which encodes a silencing RNA molecule which reduces the expression of an endogenous TGD gene. As used herein, a “Trigalactosyldiacylglycerol (TGD) polypeptide” is one which is involved in the ER to chloroplast lipid trafficking (Xu et al., 2010; Fan et al., 2015) and involved in forming a protein complex which has permease function for lipids. Four such polypeptides are known to foam or be associated with a TGD permease, namely TGD-1 (Accession No. At1g19800 and homologs in other species), TGD-2 (Accession No At2g20320 and homologs in other species), TGD-3 (Accession No. NM-105215 and homologs in other species) and TGD-4 (At3g06960 and homologs in other species) (US 20120237949). TGD5 is also involved in ER to choroplast lipid trafficking, and down-regulation of TGD5 is associated with increased oil production (US2015/337017; Fan et al., 2015). Sequences of exemplary TGD5 polypeptides are provided herein as SEQ ID NOs:250-253 (Sorghum and Zea mays TGD5, Accession Nos XM_002442154 and EU972796.1). TGD-1, -2 and -3 polypeptides are thought to be components of an ATP-Binding Cassette (ABC) transporter associated with the inner envelope membrane of the chloroplast. TGD-2 and TGD-4 polypeptides bind to phosphatidic acid whereas TGD-3 polypetide functions as an ATPase in the chloroplast stroma. As used herein, an “endogenous TGD gene” is a gene which encodes a TGD polypeptide in a plant. Mutations in TGD-1 gene in A. thaliana caused accumulation of triacylglycerols, oligogalactolipids and phosphatidic acid (PA) (Xu et al., 2005). Mutations in TGD genes or SDP1 genes, or indeed in any desired gene in a plant, can be introduced in a site-specific manner by artificial zinc finger nuclease (ZFN), TAL effector (TALEN) or CRISPR technologies (using a Cas9 type nuclease) as known in the art. Preferred exogenous genes encoding silencing RNAs are those encoding a double-stranded RNA molecule such as a hairpin RNA or an artificial microRNA precursor.

### Sucrose Metabolism

[0905] The TAG levels and/or the TTQ of the total fatty content in the cells, plants and plant parts of the invention can also be increased by modifying sucrose metabolism, particularly in the stems of plants such as sugarcane, Sorghum and Zea mays. In an embodiment, this is achieved by increasing expression of a sucrose metabolism polypeptide such as invertase or sucrose synthase, or of a sucrose transport polypeptide such as SUS1, SUS4, SUT2, SUT4, or SWEET. The effect of these polypeptides is to increase the supply of sucrose and its monosaccharide components in the cytosol of the cells and/or to decrease the transfer and/or storage of sucrose in the vacuoles of the cells, particularly in stem cells. Sequences of examples of these polypeptides are provided in SEQ ID NOs:274-292. Invertase such as bCIN, INV2 or INV3 acts to convert sucrose into hexoses which can be exported from the vacuoles into the cytoplasm (McKinley et al., 2016). Increased expression of SUS1 or SUS4 breaks down cytosolic sucrose into hexoses for glycolysis and de novo fatty acid synthesis rather than transfer of the sucrose into vacuoles, such as in stem parenchyma cells (McKinley et al., 2016). Increased expression of sugar transport polypeptides such as tonoplast sucrose exporter, for example SUT2 or SUT4, or SWEET polypeptide releases vacuolar sucrose for cytosolic glycolysis and increases de novo fatty acid biosynthesis (Bihmidine et al., 2016; Qazi et al., 2012; Schneider et al., 2012; Hedrich et al., 2015; Klemens et al., 2013).

[0906] The TAG levels and/or the TTQ of the total fatty content in the cells, plants and plant parts of the invention can also be increased by reducing the level of TST polypeptides such as TST1 or TST2, particularly in the stems of plants such as sugarcane, Sorghum and Zea mays. TST polypeptide can be decreased by mutation of the endogenous genes encoding the polypeptide, or by introduction of an exogenous polynucleotide that encodes a silencing RNA molecule. Sequences of exemplary TST cDNAs and polypeptides are provided as SEQ ID NOs:266-273.

### Fatty Acid Modifying Enzymes

[0907] As used herein, the term “FAD2” refers to a membrane bound delta-12 fatty acid desturase that desaturates oleic acid (C18:1^{Δ9}) to produce linoleic acid (C18:2^{Δ9,12}).

[0908] As used herein, the term “epoxygenase” or “fatty acid epoxygenase” refers to an enzyme that introduces an epoxy group into a fatty acid resulting in the production of an epoxy fatty acid. In preferred embodiment, the epoxy group is introduced at the 12th carbon on a fatty acid chain, in which case the epoxygenase is a Δ12-epoxygenase, especially of a C16 or C18 fatty acid chain. The epoxygenase may be a A9-epoxygenase, a A15 epoxygenase, or act at a different position in the acyl chain as known in the art. The epoxygenase may be of the P450 class. Preferred epoxygenases are of the mono-oxygenase class as described in WO98/46762. Numerous epoxygenases or presumed epoxygenases have been cloned and are known in the art. Further examples of expoxygenases include proteins comprising an amino acid sequence provided in SEQ ID NO:21 of WO 2009/129582, polypeptides encoded by genes from Crepis paleastina (CAA76156, Lee et al., 1998), Stokesia laevis (AAR23815) (monooxygenase type), Euphorbia lagascae (AAL62063) (P450 type), human CYP2J2 (arachidonic acid epoxygenase, U37143); human CYPIA1 (arachidonic acid epoxygenase, K03191), as well as variants and/or mutants thereof.

[0909] As used herein, the term, “hydroxylase” or “fatty acid hydroxylase” refers to an enzyme that introduces a hydroxyl group into a fatty acid resulting in the production of a hydroxylated fatty acid. In a preferred embodiment, the hydroxyl group is introduced at the 2nd, 12th and/or 17th carbon on a C18 fatty acid chain. Preferably, the hydroxyl group is introduced at the 12th carbon, in which case the hydroxylase is a Δ12-hydroxylase. In another preferred embodiment, the hydroxyl group is introduced at the 15th carbon on a C16 fatty acid chain. Hydroxylases may also have enzyme activity as a fatty acid desaturase. Examples of genes encoding Δ12-hydroxylases include those from Ricinus communis (AAC9010, van de Loo 1995); Physaria lindheimeri, (ABQ01458, Dauk et al., 2007); Lesquerella fendleri, (AAC32755, Broun et al., 1998); Daucus carota, (AAK30206); fatty acid hydroxylases which hydroxylate the terminus of fatty acids, for example: A. thaliana CYP86A1 (P48422, fatty acid w-hydroxylase); Vicia sativa CYP94A1 (P98188, fatty acid w-hydroxylase); mouse CYP2E1 (X62595, lauric acid ω-1 hydroxylase); rat CYP4A1 (M57718, fatty acid ω-hydroxylase), as well as as variants and/or mutants thereof.

[0910] As used herein, the term “conjugase” or “fatty acid conjugase” refers to an enzyme capable of forming a conjugated bond in the acyl chain of a fatty acid. Examples of conjugases include those encoded by genes from Calendula officinalis (AF343064, Qiu et al., 2001); Vernicia fordii (AAN87574, Dyer et al., 2002); Punica granatum (AY178446, Iwabuchi et al., 2003) and Trichosanthes kirilowii (AY178444, Iwabuchi et al., 2003); as well as as variants and/or mutants thereof.

[0911] As used herein, the term “acetylenase” or “fatty acid acetylenase” refers to an enzyme that introduces a triple bond into a fatty acid resulting in the production of an acetylenic fatty acid. In a preferred embodiment, the triple bond is introduced at the 2nd, 6th, 12th and/or 17th carbon on a C18 fatty acid chain. Examples acetylenases include those from Helianthus annuus (AA038032, ABC59684), as well as as variants and/or mutants thereof.

[0912] Examples of such fatty acid modifying genes include proteins according to the following Accession Numbers which are grouped by putative function, and homologues from other species: Δ12-acetylenases ABC00769, CAA76158, AA038036, AA038032; Δ12 conjugases AAG42259, AAG42260, AAN87574; Δ12-desaturases P46313, ABS18716, AAS57577, AAL61825, AAF04093, AAF04094; Δ12 epoxygenases XP_001840127, CAA76156, AAR23815; Δ12-hydroxylases ACF37070, AAC32755, ABQ01458, AAC49010; and Δ12 P450 enzymes such as AF406732.

### Silencing Suppressors

[0913] In an embodiment, a transgenic plant or part thereof of the invention may comprise a silencing suppressor.

[0914] As used herein, a “silencing suppressor” enhances transgene expression in a plant or part thereof of the invention. For example, the presence of the silencing suppressor results in higher levels of a polypeptide(s) produced an exogenous polynucleotide(s) in a plant or part thereof of the invention when compared to a corresponding plant or part thereof lacking the silencing suppressor. In an embodiment, the silencing suppressor preferentially binds a dsRNA molecule which is 21 base pairs in length relative to a dsRNA molecule of a different length. This is a feature of at least the p19 type of silencing suppressor, namely for p19 and its functional orthologs. In another embodiment, the silencing suppressor preferentially binds to a double-stranded RNA molecule which has overhanging 5′ ends relative to a corresponding double-stranded RNA molecule having blunt ends. This is a feature of the V2 type of silencing suppressor, namely for V2 and its functional orthologs. In an embodiment, the dsRNA molecule, or a processed RNA product thereof, comprises at least 19 consecutive nucleotides, preferably whose length is 19-24 nucleotides with 19-24 consecutive basepairs in the case of a double-stranded hairpin RNA molecule or processed RNA product, more preferably consisting of 20, 21, 22, 23 or 24 nucleotides in length, and preferably comprising a methylated nucleotide, which is at least 95% identical to the complement of the region of the target RNA, and wherein the region of the target RNA is i) within a 5′ untranslated region of the target RNA, ii) within a 5′ half of the target RNA, iii) within a protein-encoding open-reading frame of the target RNA, iv) within a 3′ half of the target RNA, or v) within a 3′ untranslated region of the target RNA.

[0915] Further details regarding silencing suppressors are well known in the art and described in WO 2013/096992 and WO 2013/096993.

### Polynucleotides

[0916] The terms “polynucleotide”, and “nucleic acid” are used interchangeably. They refer to a polymeric form of nucleotides of any length, either deoxyribonucleotides or ribonucleotides, or analogs thereof. A polynucleotide of the invention may be of genomic, cDNA, semisynthetic, or synthetic origin, double-stranded or single-stranded and by virtue of its origin or manipulation: (1) is not associated with all or a portion of a polynucleotide with which it is associated in nature, (2) is linked to a polynucleotide other than that to which it is linked in nature, or (3) does not occur in nature. The following are non-limiting examples of polynucleotides: coding or non-coding regions of a gene or gene fragment, exons, introns, messenger RNA (mRNA), transfer RNA (tRNA), ribosomal RNA (rRNA), ribozymes, cDNA, recombinant polynucleotides, plasmids, vectors, isolated DNA of any sequence, isolated RNA of any sequence, chimeric DNA of any sequence, nucleic acid probes, and primers. For in vitro use, a polynucleotide may comprise modified nucleotides such as by conjugation with a labeling component.

[0917] As used herein, an “isolated polynucleotide” refers to a polynucleotide which has been separated from the polynucleotide sequences with which it is associated or linked in its native state, or a non-naturally occurring polynucleotide.

[0918] As used herein, the term “gene” is to be taken in its broadest context and includes the deoxyribonucleotide sequences comprising the transcribed region and, if translated, the protein coding region, of a structural gene and including sequences located adjacent to the coding region on both the 5′ and 3′ ends for a distance of at least about 2 kb on either end and which are involved in expression of the gene. In this regard, the gene includes control signals such as promoters, enhancers, termination and/or polyadenylation signals that are naturally associated with a given gene, or heterologous control signals, in which case, the gene is referred to as a “chimeric gene”. The sequences which are located 5′ of the protein coding region and which are present on the mRNA are referred to as 5′ non-translated sequences. The sequences which are located 3′ or downstream of the protein coding region and which are present on the mRNA are referred to as 3′ non-translated sequences. The term “gene” encompasses both cDNA and genomic forms of a gene. A genomic form or clone of a gene contains the coding region which may be interrupted with non-coding sequences termed “introns”, “intervening regions”, or “intervening sequences.” Introns are segments of a gene which are transcribed into nuclear RNA (nRNA). Introns may contain regulatory elements such as enhancers. Introns are removed or “spliced out” from the nuclear or primary transcript; introns are therefore absent in the mRNA transcript. A gene which contains at least one intron may be subject to variable splicing, resulting in alternative mRNAs from a single transcribed gene and therefore polypeptide variants. A gene in its native state, or a chimeric gene may lack introns. The mRNA functions during translation to specify the sequence or order of amino acids in a nascent polypeptide. The term “gene” includes a synthetic or fusion molecule encoding all or part of the proteins of the invention described herein and a complementary nucleotide sequence to any one of the above.

[0919] As used herein, “chimeric DNA” refers to any DNA molecule that is not naturally found in nature; also referred to herein as a “DNA construct” or “genetic construct”. Typically, a chimeric DNA comprises regulatory and transcribed or protein coding sequences that are not naturally found together in nature. Accordingly, chimeric DNA may comprise regulatory sequences and coding sequences that are derived from different sources, or regulatory sequences and coding sequences derived from the same source, but arranged in a manner different than that found in nature. The open reading frame may or may not be linked to its natural upstream and downstream regulatory elements. The open reading frame may be incorporated into, for example, the plant genome, in a non-natural location, or in a replicon or vector where it is not naturally found such as a bacterial plasmid or a viral vector. The term “chimeric DNA” is not limited to DNA molecules which are replicable in a host, but includes DNA capable of being ligated into a replicon by, for example, specific adaptor sequences.

[0920] A “transgene” is a gene that has been introduced into the genome by a transformation procedure. The term includes a gene in a progeny plant or part thereof such as a vegetative plant part which was introducing into the genome of a progenitor cell thereof. Such progeny cells etc may be at least a 3^{rd} or 4^{th} generation progeny from the progenitor cell which was the primary transformed cell, or of the progenitor transgenic plant (referred to herein as a T0 plant). Progeny may be produced by sexual reproduction or vegetatively such as, for example, from tubers in potatoes or ratoons in sugarcane. The term “genetically modified”, “genetic modification” and variations thereof, is a broader term that includes introducing a gene into a cell by transformation or transduction, mutating a gene in a cell and genetically altering or modulating the regulation of a gene in a cell, or the progeny of any cell modified as described above.

[0921] A “genomic region” as used herein refers to a position within the genome where a transgene, or group of transgenes (also referred to herein as a cluster), have been inserted into a cell, or predecessor thereof. Such regions only comprise nucleotides that have been incorporated by the intervention of man such as by methods described herein.

[0922] A “recombinant polynucleotide” of the invention refers to a nucleic acid molecule which has been constructed or modified by artificial recombinant methods. The recombinant polynucleotide may be present in a cell of a plant or part thereof in an altered amount or expressed at an altered rate (e.g., in the case of mRNA) compared to its native state. In one embodiment, the polynucleotide is introduced into a cell that does not naturally comprise the polynucleotide. Typically an exogenous DNA is used as a template for transcription of mRNA which is then translated into a continuous sequence of amino acid residues coding for a polypeptide of the invention within the transformed cell. In another embodiment, the polynucleotide is endogenous to the plant or part thereof and its expression is altered by recombinant means, for example, an exogenous control sequence is introduced upstream of an endogenous gene of interest to enable the transformed plant or part thereof to express the polypeptide encoded by the gene, or a deletion is created in a gene of interest by ZFN, Talen or CRISPR methods.

[0923] A recombinant polynucleotide of the invention includes polynucleotides which have not been separated from other components of the cell-based or cell-free expression system, in which it is present, and polynucleotides produced in said cell-based or cell-free systems which are subsequently purified away from at least some other components. The polynucleotide can be a contiguous stretch of nucleotides or comprise two or more contiguous stretches of nucleotides from different sources (naturally occurring and/or synthetic) joined to form a single polynucleotide. Typically, such chimeric polynucleotides comprise at least an open reading frame encoding a polypeptide of the invention operably linked to a promoter suitable of driving transcription of the open reading frame in a cell of interest.

[0924] With regard to the defined polynucleotides, it will be appreciated that % identity figures higher than those provided above will encompass preferred embodiments. Thus, where applicable, in light of the minimum % identity figures, it is preferred that the polynucleotide comprises a polynucleotide sequence which is at least 60%, more preferably at least 65%, more preferably at least 70%, more preferably at least 75%, more preferably at least 80%, more preferably at least 85%, more preferably at least 90%, more preferably at least 91%, more preferably at least 92%, more preferably at least 93%, more preferably at least 94%, more preferably at least 95%, more preferably at least 96%, more preferably at least 97%, more preferably at least 98%, more preferably at least 99%, more preferably at least 99.1%, more preferably at least 99.2%, more preferably at least 99.3%, more preferably at least 99.4%, more preferably at least 99.5%, more preferably at least 99.6%, more preferably at least 99.7%, more preferably at least 99.8%, and even more preferably at least 99.9% identical to the relevant nominated SEQ ID NO.

[0925] A polynucleotide of, or useful for, the present invention may selectively hybridise, under stringent conditions, to a polynucleotide defined herein. As used herein, stringent conditions are those that: (1) employ during hybridisation a denaturing agent such as formamide, for example, 50% (v/v) formamide with 0.1% (w/v) bovine serum albumin, 0.1% Ficoll, 0.1% polyvinylpyrrolidone, 50 mM sodium phosphate buffer at pH 6.5 with 750 mM NaCl, 75 mM sodium citrate at 42° C.; or (2) employ 50% formamide, 5×SSC (0.75 M NaCl, 0.075 M sodium citrate), 50 mM sodium phosphate (pH 6.8), 0.1% sodium pyrophosphate, 5×Denhardt's solution, sonicated salmon sperm DNA (50 g/ml), 0.1% SDS and 10% dextran sulfate at 42° C. in 0.2×SSC and 0.1% SDS, and/or (3) employ low ionic strength and high temperature for washing, for example, 0.015 M NaCl/0.0015 M sodium citrate/0.1% SDS at 50° C.

[0926] Polynucleotides of the invention may possess, when compared to naturally occurring molecules, one or more mutations which are deletions, insertions, or substitutions of nucleotide residues. Polynucleotides which have mutations relative to a reference sequence can be either naturally occurring (that is to say, isolated from a natural source) or synthetic (for example, by performing site-directed mutagenesis or DNA shuffling on the nucleic acid as described above).

### Polynucleotides for Reducing Expression of Genes

### RNA Interference

[0927] RNA interference (RNAi) is particularly useful for specifically reducing the expression of a gene, which results in reduced production of a particular protein if the gene encodes a protein. Although not wishing to be limited by theory, Waterhouse et al. (1998) have provided a model for the mechanism by which dsRNA (duplex RNA) can be used to reduce protein production. This technology relies on the presence of dsRNA molecules that contain a sequence that is essentially identical to the mRNA of the gene of interest or part thereof. Conveniently, the dsRNA can be produced from a single promoter in a recombinant vector or host cell, where the sense and anti-sense sequences are flanked by an unrelated sequence which enables the sense and anti-sense sequences to hybridize to form the dsRNA molecule with the unrelated sequence forming a loop structure. The design and production of suitable dsRNA molecules is well within the capacity of a person skilled in the art, particularly considering Waterhouse et al. (1998), Smith et al. (2000), WO 99/32619, WO 99/53050, WO 99/49029, and WO 01/34815.

[0928] In one example, a DNA is introduced that directs the synthesis of an at least partly double stranded RNA product(s) with homology to the target gene to be inactivated such as, for example, a SDP1, TGD, plastidial GPAT, plastidial LPAAT, plastidial PAP, AGPase gene. The DNA therefore comprises both sense and antisense sequences that, when transcribed into RNA, can hybridize to form the double stranded RNA region. In one embodiment of the invention, the sense and antisense sequences are separated by a spacer region that comprises an intron which, when transcribed into RNA, is spliced out. This arrangement has been shown to result in a higher efficiency of gene silencing (Smith et al., 2000). The double stranded region may comprise one or two RNA molecules, transcribed from either one DNA region or two. The presence of the double stranded molecule is thought to trigger a response from an endogenous system that destroys both the double stranded RNA and also the homologous RNA transcript from the target gene, efficiently reducing or eliminating the activity of the target gene.

[0929] The length of the sense and antisense sequences that hybridize should each be at least 19 contiguous nucleotides, preferably at least 50 contiguous nucleotides, more preferably at least 100 or at least 200 contiguous nucleotides. Generally, a sequence of 100-1000 nucleotides corresponding to a region of the target gene mRNA is used. The full-length sequence corresponding to the entire gene transcript may be used. The degree of identity of the sense sequence to the targeted transcript (and therefore also the identity of the antisense sequence to the complement of the target transcript) should be at least 85%, at least 90%, or 95-100%. The RNA molecule may of course comprise unrelated sequences which may function to stabilize the molecule. The RNA molecule may be expressed under the control of a RNA polymerase II or RNA polymerase III promoter. Examples of the latter include tRNA or snRNA promoters.

[0930] Preferred small interfering RNA (“siRNA”) molecules comprise a nucleotide sequence that is identical to about 19-25 contiguous nucleotides of the target mRNA. Preferably, the siRNA sequence commences with the dinucleotide AA, comprises a GC-content of about 30-70% (preferably, 30-60%, more preferably 40-60% and more preferably about 45%-55%), and does not have a high percentage identity to any nucleotide sequence other than the target in the genome of the organism in which it is to be introduced, for example, as determined by standard BLAST search.

microRNA

[0931] MicroRNAs (abbreviated miRNAs) are generally 19-25 nucleotides (commonly about 20-24 nucleotides in plants) non-coding RNA molecules that are derived from larger precursors that form imperfect stem-loop structures. miRNAs bind to complementary sequences on target messenger RNA transcripts (mRNAs), usually resulting in translational repression or target degradation and gene silencing. Artificial miRNAs (amiRNAs) can be designed based on natural miRNAs for reducing the expression of any gene of interest, as well known in the art.

[0932] In plant cells, miRNA precursor molecules are believed to be largely processed in the nucleus. The pri-miRNA (containing one or more local double-stranded or “hairpin” regions as well as the usual 5′ “cap” and polyadenylated tail of an mRNA) is processed to a shorter miRNA precursor molecule that also includes a stem-loop or fold-back structure and is termed the “pre-miRNA”. In plants, the pre-miRNAs are cleaved by distinct DICER-like (DCL) enzymes, yielding miRNA:miRNA* duplexes. Prior to transport out of the nucleus, these duplexes are methylated.

[0933] In the cytoplasm, the miRNA strand from the miRNA:miRNA duplex is selectively incorporated into an active RNA-induced silencing complex (RISC) for target recognition. The RISC-complexes contain a particular subset of Argonaute proteins that exert sequence-specific gene repression (see, for example, Millar and Waterhouse, 2005; Pasquinelli et al., 2005; Almeida and Allshire, 2005).

### Cosuppression

[0934] Genes can suppress the expression of related endogenous genes and/or transgenes already present in the genome, a phenomenon twined homology-dependent gene silencing. Most of the instances of homologydependent gene silencing fall into two classes—those that function at the level of transcription of the transgene, and those that operate post-transcriptionally.

[0935] Post-transcriptional homology-dependent gene silencing (i.e., cosuppression) describes the loss of expression of a transgene and related endogenous or viral genes in transgenic plants. Cosuppression often, but not always, occurs when transgene transcripts are abundant, and it is generally thought to be triggered at the level of mRNA processing, localization, and/or degradation. Several models exist to explain how cosuppression works (see in Taylor, 1997).

[0936] Cosuppression involves introducing an extra copy of a gene or a fragment thereof into a plant in the sense orientation with respect to a promoter for its expression. The size of the sense fragment, its correspondence to target gene regions, and its degree of sequence identity to the target gene can be determined by those skilled in the art. In some instances, the additional copy of the gene sequence interferes with the expression of the target plant gene. Reference is made to WO 97/20936 and EP 0465572 for methods of implementing co-suppression approaches.

### Antisense Polynucleotides

[0937] The term “antisense polynucletoide” shall be taken to mean a DNA or RNA molecule that is complementary to at least a portion of a specific mRNA molecule encoding an endogenous polypeptide and capable of interfering with a post-transcriptional event such as mRNA translation. The use of antisense methods is well known in the art (see for example, G. Hartmann and S. Endres, Manual of Antisense Methodology, Kluwer (1999)). The use of antisense techniques in plants has been reviewed by Bourque (1995) and Senior (1998). Bourque (1995) lists a large number of examples of how antisense sequences have been utilized in plant systems as a method of gene inactivation. Bourque also states that attaining 100% inhibition of any enzyme activity may not be necessary as partial inhibition will more than likely result in measurable change in the system. Senior (1998) states that antisense methods are now a very well established technique for manipulating gene expression.

[0938] In one embodiment, the antisense polynucleotide hybridises under physiological conditions, that is, the antisense polynucleotide (which is fully or partially single stranded) is at least capable of forming a double stranded polynucleotide with mRNA encoding an endogenous polypeptide, for example, a SDP1, TGD, plastidial GPAT, plastidial LPAAT, plastidial PAP or AGPase mRNA under normal conditions in a cell.

[0939] Antisense molecules may include sequences that correspond to the structural genes or for sequences that effect control over the gene expression or splicing event. For example, the antisense sequence may correspond to the targeted coding region of endogenous gene, or the 5′-untranslated region (UTR) or the 3′-UTR or combination of these. It may be complementary in part to intron sequences, which may be spliced out during or after transcription, preferably only to exon sequences of the target gene. In view of the generally greater divergence of the UTRs, targeting these regions provides greater specificity of gene inhibition.

[0940] The length of the antisense sequence should be at least 19 contiguous nucleotides, preferably at least 50 nucleotides, and more preferably at least 100, 200, 500 or 1000 nucleotides. The full-length sequence complementary to the entire gene transcript may be used. The length is most preferably 100-2000 nucleotides. The degree of identity of the antisense sequence to the targeted transcript should be at least 90% and more preferably 95-100%. The antisense RNA molecule may of course comprise unrelated sequences which may function to stabilize the molecule.

### Recombinant Vectors

[0941] One embodiment of the present invention includes a recombinant vector, which comprises at least one polynucleotide defined herein and is capable of delivering the polynucleotide into a host cell. Recombinant vectors include expression vectors. Recombinant vectors contain heterologous polynucleotide sequences, that is, polynucleotide sequences that are not naturally found adjacent to a polynucleotide defined herein, that preferably, are derived from a different species. The vector can be either RNA or DNA, and typically is a viral vector, derived from a virus, or a plasmid. Plasmid vectors typically include additional nucleic acid sequences that provide for easy selection, amplification, and transformation of the expression cassette in prokaryotic cells, e.g., pUC-derived vectors, pGEM-derived vectors or binary vectors containing one or more T-DNA regions. Additional nucleic acid sequences include origins of replication to provide for autonomous replication of the vector, selectable marker genes, preferably encoding antibiotic or herbicide resistance, unique multiple cloning sites providing for multiple sites to insert nucleic acid sequences or genes encoded in the nucleic acid construct, and sequences that enhance transformation of prokaryotic and eukaryotic (especially plant) cells.

[0942] “Operably linked” as used herein, refers to a functional relationship between two or more nucleic acid (e.g., DNA) segments. Typically, it refers to the functional relationship of a transcriptional regulatory element (promoter) to a transcribed sequence. For example, a promoter is operably linked to a coding sequence of a polynucleotide defined herein, if it stimulates or modulates the transcription of the coding sequence in an appropriate cell. Generally, promoter transcriptional regulatory elements that are operably linked to a transcribed sequence are physically contiguous to the transcribed sequence, i.e., they are cis-acting. However, some transcriptional regulatory elements such as enhancers need not be physically contiguous or located in close proximity to the coding sequences whose transcription they enhance.

[0943] When there are multiple promoters present, each promoter may independently be the same or different.

[0944] Recombinant vectors may also contain one or more signal peptide sequences to enable an expressed polypeptide defined herein to be retained in the endoplasmic reticulum (ER) in the cell, or transfer into a plastid, and/or contain fusion sequences which lead to the expression of nucleic acid molecules as fusion proteins. Examples of suitable signal segments include any signal segment capable of directing the secretion or localisation of a polypeptide defined herein.

[0945] To facilitate identification of transformants, the recombinant vector desirably comprises a selectable or screenable marker gene. By “marker gene” is meant a gene that imparts a distinct phenotype to cells expressing the marker gene and thus, allows such transformed cells to be distinguished from cells that do not have the marker. A selectable marker gene confers a trait for which one can “select” based on resistance to a selective agent (e.g., a herbicide, antibiotic). A screenable marker gene (or reporter gene) confers a trait that one can identify through observation or testing, that is, by “screening” (e.g., β-glucuronidase, luciferase, GFP or other enzyme activity not present in untransformed cells). Exemplary selectable markers for selection of plant transformants include, but are not limited to, a hyg gene which encodes hygromycin B resistance; a neomycin phosphotransferase (nptII) gene conferring resistance to kanamycin, paromomycin; a glutathione-S-transferase gene from rat liver conferring resistance to glutathione derived herbicides as for example, described in EP 256223; a glutamine synthetase gene conferring, upon overexpression, resistance to glutamine synthetase inhibitors such as phosphinothricin as for example, described in WO 87/05327; an acetyltransferase gene from Streptomyces viridochromogenes conferring resistance to the selective agent phosphinothricin as for example, described in EP 275957; a gene encoding a 5-enolshikimate-3-phosphate synthase (EPSPS) conferring tolerance to N-phosphonomethylglycine as for example, described by Hinchee et al. (1988); a bar gene conferring resistance against bialaphos as for example, described in WO91/02071; a nitrilase gene such as bxn from Klebsiella ozaenae which confers resistance to bromoxynil (Stalker et al., 1988); a dihydrofolate reductase (DHFR) gene conferring resistance to methotrexate (Thillet et al., 1988); a mutant acetolactate synthase gene (ALS) which confers resistance to imidazolinone, sulfonylurea, or other ALS-inhibiting chemicals (EP 154,204); a mutated anthranilate synthase gene that confers resistance to 5-methyl tryptophan; or a dalapon dehalogenase gene that confers resistance to the herbicide.

[0946] Preferably, the recombinant vector is stably incorporated into the genome of the cell such as the plant cell. Accordingly, the recombinant vector may comprise appropriate elements which allow the vector to be incorporated into the genome, or into a chromosome of the cell.

### Expression Vector

[0947] As used herein, an “expression vector” is a DNA vector that is capable of transforming a host cell and of effecting expression of one or more specified polynucleotides. Expression vectors of the present invention contain regulatory sequences such as transcription control sequences, translation control sequences, origins of replication, and other regulatory sequences that are compatible with the host cell and that control the expression of polynucleotides of the present invention. In particular, expression vectors of the present invention include transcription control sequences. Transcription control sequences are sequences which control the initiation, elongation, and termination of transcription. Particularly important transcription control sequences are those which control transcription initiation such as promoter, enhancer, operator and repressor sequences. The choice of the regulatory sequences used depends on the target organism such as a plant and/or target organ or tissue of interest. Such regulatory sequences may be obtained from any eukaryotic organism such as plants or plant viruses, or may be chemically synthesized. A number of vectors suitable for stable transfection of plant cells or for the establishment of transgenic plants have been described in for example, Pouwels et al., Cloning Vectors: A Laboratory Manual, 1985, supp. 1987, Weissbach and Weissbach, Methods for Plant Molecular Biology, Academic Press, 1989, and Gelvin et al., Plant Molecular Biology Manual, Kluwer Academic Publishers, 1990. Typically, plant expression vectors include for example, one or more cloned plant genes under the transcriptional control of 5′ and 3′ regulatory sequences and a dominant selectable marker. Such plant expression vectors also can contain a promoter regulatory region (e.g., a regulatory region controlling inducible or constitutive, environmentally- or developmentally-regulated, or cell- or tissue-specific expression), a transcription initiation start site, a ribosome binding site, a transcription termination site, and/or a polyadenylation signal.

[0948] A number of constitutive promoters that are active in plant cells have been described. Suitable promoters for constitutive expression in plants include, but are not limited to, the cauliflower mosaic virus (CaMV) 35S promoter, the Figwort mosaic virus (FMV) 35S, the light-inducible promoter from the small subunit (SSU) of the ribulose-1,5-bis-phosphate carboxylase, the rice cytosolic triosephosphate isomerase promoter, the adenine phosphoribosyltransferase promoter of Arabidopsis, the rice actin 1 gene promoter, the mannopine synthase and octopine synthase promoters, the Adh promoter, the sucrose synthase promoter, the R gene complex promoter, and the chlorophyll α/β binding protein gene promoter. These promoters have been used to create DNA vectors that have been expressed in plants, see for example, WO 84/02913. All of these promoters have been used to create various types of plant-expressible recombinant DNA vectors.

[0949] For the purpose of expression in source tissues of the plant such as the leaf, seed, root or stem, it is preferred that the promoters utilized in the present invention have relatively high expression in these specific tissues. For this purpose, one may choose from a number of promoters for genes with tissue- or cell-specific, or -enhanced expression. Examples of such promoters reported in the literature include, the chloroplast glutamine synthetase GS2 promoter from pea, the chloroplast fructose-1,6-biphosphatase promoter from wheat, the nuclear photosynthetic ST-LS1 promoter from potato, the serine/threonine kinase promoter and the glucoamylase (CHS) promoter from Arabidopsis thaliana. Also reported to be active in photosynthetically active tissues are the ribulose-1,5-bisphosphate carboxylase promoter from eastern larch (Larix laricina), the promoter for the Cab gene, Cab6, from pine, the promoter for the Cab-1 gene from wheat, the promoter for the Cab-1 gene from spinach, the promoter for the Cab 1R gene from rice, the pyruvate, orthophosphate dikinase (PPDK) promoter from Zea mays, the promoter for the tobacco Lhcb1*2 gene, the Arabidopsis thaliana Suc2 sucrose-H³⁰ symporter promoter, and the promoter for the thylakoid membrane protein genes from spinach (PsaD, PsaF, PsaE, PC, FNR, AtpC, AtpD, Cab, RbcS). Other promoters for the chlorophyll α/β-binding proteins may also be utilized in the present invention such as the promoters for LhcB gene and PsbP gene from white mustard (Sinapis alba).

[0950] A variety of plant gene promoters that are regulated in response to environmental, hormonal, chemical, and/or developmental signals, also can be used for expression of RNA-binding protein genes in plant cells, including promoters regulated by (1) heat, (2) light (e.g., pea RbcS-3A promoter, maize RbcS promoter), (3) hormones such as abscisic acid, (4) wounding (e.g., WunI), or (5) chemicals such as methyl jasmonate, salicylic acid, steroid hormones, alcohol, Safeners (WO 97/06269), or it may also be advantageous to employ (6) organ-specific promoters.

[0951] As used herein, the term “plant storage organ specific promoter” refers to a promoter that preferentially, when compared to other plant tissues, directs gene transcription in a storage organ of a plant. For the purpose of expression in sink tissues of the plant such as the tuber of the potato plant, the fruit of tomato, or the seed of soybean, canola, cotton, Zea mays, wheat, rice, and barley, it is preferred that the promoters utilized in the present invention have relatively high expression in these specific tissues. The promoter for β-conglycinin or other seed-specific promoters such as the napin, zein, linin and phaseolin promoters, can be used. Root specific promoters may also be used. An example of such a promoter is the promoter for the acid chitinase gene. Expression in root tissue could also be accomplished by utilizing the root specific subdomains of the CaMV 35S promoter that have been identified.

[0952] In a particularly preferred embodiment, the promoter directs expression in tissues and organs in which lipid biosynthesis takes place. Such promoters may act in seed development at a suitable time for modifying lipid composition in seeds. Preferred promoters for seed-specific expression include: 1) promoters from genes encoding enzymes involved in lipid biosynthesis and accumulation in seeds such as desaturases and elongases, 2) promoters from genes encoding seed storage proteins, and 3) promoters from genes encoding enzymes involved in carbohydrate biosynthesis and accumulation in seeds. Seed specific promoters which are suitable are, the oilseed rape napin gene promoter (U.S. Pat. No. 5,608,152), the Vicia faba USP promoter (Baumlein et al., 1991), the Arabidopsis oleosin promoter (WO 98/45461), the Phaseolus vulgaris phaseolin promoter (U.S. Pat. No. 5,504,200), the Brassica Bce4 promoter (WO 91/13980), or the legumin B4 promoter (Baumlein et al., 1992), and promoters which lead to the seed-specific expression in monocots such as maize, barley, wheat, lye, rice and the like. Notable promoters which are suitable are the barley 1pt2 or 1pt1 gene promoter (WO 95/15389 and WO 95/23230), or the promoters described in WO 99/16890 (promoters from the barley hordein gene, the rice glutelin gene, the rice oryzin gene, the rice prolamin gene, the wheat gliadin gene, the wheat glutelin gene, the maize zein gene, the oat glutelin gene, the sorghum kasirin gene, the rye secalin gene). Other promoters include those described by Broun et al. (1998), Potenza et al. (2004), US 20070192902 and US 20030159173. In an embodiment, the seed specific promoter is preferentially expressed in defined parts of the seed such as the cotyledon(s) or the endosperm. Examples of cotyledon specific promoters include, but are not limited to, the FP1 promoter (Ellerstrom et al., 1996), the pea legumin promoter (Perrin et al., 2000), and the bean phytohemagglutnin promoter (Perrin et al., 2000). Examples of endosperm specific promoters include, but are not limited to, the maize zein-1 promoter (Chikwamba et al., 2003), the rice glutelin-1 promoter (Yang et al., 2003), the barley D-hordein promoter (Horvath et al., 2000) and wheat HMW glutenin promoters (Alvarez et al., 2000). In a further embodiment, the seed specific promoter is not expressed, or is only expressed at a low level, in the embryo and/or after the seed germinates.

[0953] In another embodiment, the plant storage organ specific promoter is a fruit specific promoter. Examples include, but are not limited to, the tomato polygalacturonase, E8 and Pds promoters, as well as the apple ACC oxidase promoter (for review, see Potenza et al., 2004). In a preferred embodiment, the promoter preferentially directs expression in the edible parts of the fruit, for example the pith of the fruit, relative to the skin of the fruit or the seeds within the fruit.

[0954] In an embodiment, the inducible promoter is the Aspergillus nidulans alc system. Examples of inducible expression systems which can be used instead of the Aspergillus nidulans alc system are described in a review by Padidam (2003) and Corrado and Karali (2009). In another embodiment, the inducible promoter is a safener inducible promoter such as, for example, the maize ln2-1 or ln2-2 promoter (Hershey and Stoner, 1991), the safener inducible promoter is the maize GST-27 promoter (Jepson et al., 1994), or the soybean GH2/4 promoter (Ulmasov et al., 1995).

[0955] In another embodiment, the inducible promoter is a senescence inducible promoter such as, for example, senescence-inducible promoter SAG (senescence associated gene) 12 and SAG 13 from Arabidopsis (Gan, 1995; Gan and Amasino, 1995) and LSC54 from Brassica napus (Buchanan-Wollaston, 1994). Such promoters show increased expression at about the onset of senescence of plant tissues, in particular the leaves.

[0956] For expression in vegetative tissue leaf-specific promoters, such as the ribulose biphosphate carboxylase (RBCS) promoters, can be used. For example, the tomato RBCS1, RBCS2 and RBCS3A genes are expressed in leaves and light grown seedlings (Meier et al., 1997). A ribulose bisphosphate carboxylase promoters expressed almost exclusively in mesophyll cells in leaf blades and leaf sheaths at high levels, described by Matsuoka et al. (1994), can be used. Another leaf-specific promoter is the light harvesting chlorophyll a/b binding protein gene promoter (see, Shiina et al., 1997). The Arabidopsis thaliana myb-related gene promoter (Atmyb5) described by Li et al. (1996), is leaf-specific. The Atmyb5 promoter is expressed in developing leaf trichomes, stipules, and epidermal cells on the margins of young rosette and cauline leaves, and in immature seeds. A leaf promoter identified in maize by Busk et al. (1997), can also be used.

[0957] In some instances, for example when LEC2 or BBM is recombinantly expressed, it may be desirable that the transgene is not expressed at high levels. An example of a promoter which can be used in such circumstances is a truncated napin A promoter which retains the seed-specific expression pattern but with a reduced expression level (Tan et al., 2011).

[0958] The 5′ non-translated leader sequence can be derived from the promoter selected to express the heterologous gene sequence of the polynucleotide of the present invention, or may be heterologous with respect to the coding region of the enzyme to be produced, and can be specifically modified if desired so as to increase translation of mRNA. For a review of optimizing expression of transgenes, see Koziel et al. (1996). The 5′ non-translated regions can also be obtained from plant viral RNAs (Tobacco mosaic virus, Tobacco etch virus, Maize dwarf mosaic virus, Alfalfa mosaic virus, among others) from suitable eukaryotic genes, plant genes (wheat and maize chlorophyll a/b binding protein gene leader), or from a synthetic gene sequence. The present invention is not limited to constructs wherein the non-translated region is derived from the 5′ non-translated sequence that accompanies the promoter sequence. The leader sequence could also be derived from an unrelated promoter or coding sequence. Leader sequences useful in context of the present invention comprise the maize Hsp70 leader (U.S. Pat. No. 5,362,865 and U.S. Pat. No. 5,859,347), and the TMV omega element.

[0959] The termination of transcription is accomplished by a 3′ non-translated DNA sequence operably linked in the expression vector to the polynucleotide of interest. The 3′ non-translated region of a recombinant DNA molecule contains a polyadenylation signal that functions in plants to cause the addition of adenylate nucleotides to the 3′ end of the RNA. The 3′ non-translated region can be obtained from various genes that are expressed in plant cells. The nopaline synthase 3′ untranslated region, the 3′ untranslated region from pea small subunit Rubisco gene, the 3′ untranslated region from soybean 7S seed storage protein gene are commonly used in this capacity. The 3′ transcribed, non-translated regions containing the polyadenylate signal of Agrobacterium tumor-inducing (Ti) plasmid genes are also suitable.

[0960] Recombinant DNA technologies can be used to improve expression of a transformed polynucleotide by manipulating, for example, the efficiency with which the resultant transcripts are translated by codon optimisation according to the host cell species or the deletion of sequences that destabilize transcripts, and the efficiency of post-translational modifications.

### Transfer Nucleic Acids

[0961] Transfer nucleic acids can be used to deliver an exogenous polynucleotide to a cell and comprise one, preferably two, border sequences and one or more polynucleotides of interest. The transfer nucleic acid may or may not encode a selectable marker. Preferably, the transfer nucleic acid forms part of a binary vector in a bacterium, where the binary vector further comprises elements which allow replication of the vector in the bacterium, selection, or maintenance of bacterial cells containing the binary vector. Upon transfer to a eukaryotic cell, the transfer nucleic acid component of the binary vector is capable of integration into the genome of the eukaryotic cell or, for transient expression experiments, merely of expression in the cell.

[0962] As used herein, the term “extrachromosomal transfer nucleic acid” refers to a nucleic acid molecule that is capable of being transferred from a bacterium such as Agrobacterium sp., to a plant cell such as a plant leaf cell. An extrachromosomal transfer nucleic acid is a genetic element that is well-known as an element capable of being transferred, with the subsequent integration of a nucleotide sequence contained within its borders into the genome of the recipient cell. In this respect, a transfer nucleic acid is flanked, typically, by two “border” sequences, although in some instances a single border at one end can be used and the second end of the transferred nucleic acid is generated randomly in the transfer process. A polynucleotide of interest is typically positioned between the left border-like sequence and the right border-like sequence of a transfer nucleic acid. The polynucleotide contained within the transfer nucleic acid may be operably linked to a variety of different promoter and terminator regulatory elements that facilitate its expression, that is, transcription and/or translation of the polynucleotide. Transfer DNAs (T-DNAs) from Agrobacterium sp. such as Agrobacterium tumefaciens or Agrobacterium rhizogenes, and man made variants/mutants thereof are probably the best characterized examples of transfer nucleic acids. Another example is P-DNA (“plant-DNA”) which comprises T-DNA border-like sequences from plants.

[0963] As used herein, “T-DNA” refers to a T-DNA of an Agrobacterium tumefaciens Ti plasmid or from an Agrobacterium rhizogenes Ri plasmid, or variants thereof which function for transfer of DNA into plant cells. The T-DNA may comprise an entire T-DNA including both right and left border sequences, but need only comprise the minimal sequences required in cis for transfer, that is, the right T-DNA border sequence. The T-DNAs of the invention have inserted into them, anywhere between the right and left border sequences (if present), the polynucleotide of interest. The sequences encoding factors required in trans for transfer of the T-DNA into a plant cell such as vir genes, may be inserted into the T-DNA, or may be present on the same replicon as the T-DNA, or preferably are in trans on a compatible replicon in the Agrobacterium host. Such “binary vector systems” are well known in the art. As used herein, “P-DNA” refers to a transfer nucleic acid isolated from a plant genome, or man made variants/mutants thereof, and comprises at each end, or at only one end, a T-DNA border-like sequence.

[0964] As used herein, a “border” sequence of a transfer nucleic acid can be isolated from a selected organism such as a plant or bacterium, or be a man made variant/mutant thereof. The border sequence promotes and facilitates the transfer of the polynucleotide to which it is linked and may facilitate its integration in the recipient cell genome. In an embodiment, a border-sequence is between 10-80 bp in length. Border sequences from T-DNA from Agrobacterium sp. are well known in the art and include those described in Lacroix et al. (2008).

[0965] Whilst traditionally only Agrobacterium sp. have been used to transfer genes to plants cells, there are now a large number of systems which have been identified/developed which act in a similar manner to Agrobacterium sp. Several non-Agrobacterium species have recently been genetically modified to be competent for gene transfer (Chung et al., 2006; Broothaerts et al., 2005). These include Rhizobium sp. NGR234, Sinorhizobium meliloti and Mezorhizobium loti.

[0966] As used herein, the terms “transfection”, “transformation” and variations thereof are generally used interchangeably. “Transfected” or “transformed” cells may have been manipulated to introduce the polynucleotide(s) of interest, or may be progeny cells derived therefrom.

### Plants

[0967] The invention also provides a plant or part thereof comprising two or more exogenous polynucleotides and/or genetic modifications as described herein. The term “plant” when used as a noun refers to whole plants, whilst the term “part thereof” refers to plant organs (e.g., leaves, stems, roots, flowers, fruit), single cells (e.g., pollen), seed, seed parts such as an embryo, endosperm, scutellum or seed coat, plant tissue such as vascular tissue, plant cells and progeny of the same. As used herein, plant parts comprise plant cells.

[0968] As used herein, the terms “in a plant” and “in the plant” in the context of a modification to the plant means that the modification has occurred in at least one part of the plant, including where the modification has occurred throughout the plant, and does not exclude where the modification occurs in only one or more but not all parts of the plant. For example, a tissue-specific promoter is said to be expressed “in a plant”, even though it might be expressed only in certain parts of the plant. Analogously, “a transcription factor polypeptide that increases the expression of one or more glycolytic and/or fatty acid biosynthetic genes in the plant” means that the increased expression occurs in at least a part of the plant.

[0969] As used herein, the term “plant” is used in it broadest sense, including any organism in the Kingdom Plantae. It also includes red and brown algae as well as green algae. It includes, but is not limited to, any species of flowering plant, grass, crop or cereal (e.g., oilseed, maize, soybean), fodder or forage, fruit or vegetable plant, herb plant, woody plant or tree. It is not meant to limit a plant to any particular structure. It also refers to a unicellular plant (e.g., microalga). The term “part thereof” in reference to a plant refers to a plant cell and progeny of same, a plurality of plant cells, a structure that is present at any stage of a plant's development, or a plant tissue. Such structures include, but are not limited to, leaves, stems, flowers, fruits, nuts, roots, seed, seed coat, embryos. The term “plant tissue” includes differentiated and undifferentiated tissues of plants including those present in leaves, stems, flowers, fruits, nuts, roots, seed, for example, embryonic tissue, endosperm, dermal tissue (e.g., epidermis, periderm), vascular tissue (e.g., xylem, phloem), or ground tissue (comprising parenchyma, collenchyma, and/or sclerenchyma cells), as well as cells in culture (e.g., single cells, protoplasts, callus, embryos, etc.). Plant tissue may be in planta, in organ culture, tissue culture, or cell culture.

[0970] As used herein, the term “vegetative tissue” or “vegetative plant part” is any plant tissue, organ or part other than organs for sexual reproduction of plants. The organs for sexual reproduction of plants are specifically seed bearing organs, flowers, pollen, fruits and seeds. Vegetative tissues and parts include at least plant leaves, stems (including bolts and tillers but excluding the heads), tubers and roots, but excludes flowers, pollen, seed including the seed coat, embryo and endosperm, fruit including mesocarp tissue, seed-bearing pods and seed-bearing heads. In one embodiment, the vegetative part of the plant is an aerial plant part. In another or further embodiment, the vegetative plant part is a green part such as a leaf or stem.

[0971] A “transgenic plant” or variations thereof refers to a plant that contains a transgene not found in a wild-type plant of the same species, variety or cultivar. Transgenic plants as defined in the context of the present invention include plants and their progeny which have been genetically modified using recombinant techniques to cause production of at least one polypeptide defined herein in the desired plant or part thereof. Transgenic plant parts has a corresponding meaning. The plant and plant parts of the invention may comprise genetic modifications, for example gene mutations, and be considered as “non-transgenic” provided they lack transgenes.

[0972] The terms “seed” and “grain” are used interchangeably herein. “Grain” refers to mature grain such as harvested grain or grain which is still on a plant but ready for harvesting, but can also refer to grain after imbibition or germination, according to the context. Mature grain commonly has a moisture content of less than about 18%. In a preferred embodiment, the moisture content of the grain is at a level which is generally regarded as safe for storage, preferably between 5% and 15%, between 6% and 8%, between 8% and 10%, or between 10% and 15%. “Developing seed” as used herein refers to a seed prior to maturity, typically found in the reproductive structures of the plant after fertilisation or anthesis, but can also refer to such seeds prior to maturity which are isolated from a plant. Mature seed commonly has a moisture content of less than about 12%.

[0973] As used herein, the term “plant storage organ” refers to a part of a plant specialized to store energy in the form of for example, proteins, carbohydrates, lipid. Examples of plant storage organs are seed, fruit, tuberous roots, and tubers. A preferred plant storage organ of the invention is seed.

[0974] As used herein, the term “phenotypically normal” refers to a genetically modified plant or part thereof, for example a plant such as a tragsenic plant, or a storage organ such as a seed, tuber or fruit of the invention not having a significantly reduced ability to grow and reproduce when compared to an unmodified plant or part thereof. Preferably, the biomass, growth rate, germination rate, storage organ size, seed size and/or the number of viable seeds produced is not less than 90% of that of a plant lacking said genetic modifications or exogenous polynucleotides when grown under identical conditions. This term does not encompass features of the plant which may be different to the wild-type plant but which do not effect the usefulness of the plant for commercial purposes such as, for example, a ballerina phenotype of seedling leaves. In an embodiment, the genetically modified plant or part thereof which is phenotypically normal comprises a recombinant polynucleotide encoding a silencing suppressor operably linked to a plant storage organ specific promoter and has an ability to grow or reproduce which is essentially the same as a corresponding plant or part thereof not comprising said polynucleotide.

[0975] Plants go through a series of growing stages from sowing of a seed, germination and emergence of a seedling, through to flowering, seed setting, physiological maturity and ultimately senescence. These stages are well known and readily defined, for example for Sorghum plants as follows. Taking the day the seedling first emerges above the soil as day 0, the vegetative stage of growth is defined herein as from 10 days to initiation of flowering at about 60-70 days, and physiogical maturity is reached at about 100 days, depending on the environmental conditions. The vegetative stage includes the boot leaf stage from about 45 days until the first flowering. The boot leaf is the last leaf formed on the plant, from which the panicle (head) emerges. The “boot leaf stage” is defined as from when the boot leaf has fully emerged to initiation of flowering.

[0976] As used herein, the term “commencement of flowering” or “initiation of flowering” with respect to a plant refers to the time that the first flower on the plant opens, or the time of onset of anthesis.

[0977] As used herein, the term “seed set” with respect to a seed-bearing plant refers to the time when the first seed of the plant reaches maturity. This is typically observable by the colour of the seed or its moisture content, well known in the art.

[0978] As used herein, the term “mature” as it relates to a plant leaf means that it has reached full size but has not begun to show signs of ageing or death such as yellowing and/or sensensce. The skilled person can readily determine whether a leaf of a particular plant can be considered as mature.

[0979] As used herein, the term “senescence” with respect to a whole plant refers to the final stage of plant development which follows the completion of growth, usually after the plant reaches maximum aerial biomass or height. Senescence begins when the plant aerial biomass reaches its maximum and begins to decline in amount and generally ends with death of most of the plant tissues. It is during this stage that the plant mobilises and recycles cellular components from leaves and other parts which accumulated during growth to other parts to complete its reproductive development. Senescence is a complex, regulated process which involves new or increased gene expression of some genes. Often, some plant parts are senescing while other parts of the same plant continue to grow. Therefore, with respect to a plant leaf or other green organ, the term “senescence” as used herein refers to the time when the amount of chlorophyll in the leaf or organ begins to decrease. Senescence is typically associated with dessication of the leaf or organ, mostly in the last stage of senescence. Senescence is usually observable by the change in colour of the leaf from green towards yellow and eventually to brown when fully dessicated. It is believed that cellular senescence underlies plant and organ senescence.

[0980] Plants provided by or contemplated for use in the practice of the present invention include both monocotyledons and dicotyledons. In preferred embodiments, the plants of the present invention are crop plants (for example, cereals and pulses, maize, wheat, potatoes, rice, sorghum, millet, cassava, barley) or legumes such as soybean, beans or peas. The plants may be grown for production of edible roots, tubers, leaves, stems, flowers or fruit. The plants may be vegetable plants whose vegetative parts are used as food. The plants of the invention may be: Acrocomia aculeata (macauba palm), Arabidopsis thaliana, Aracinis hypogaea (peanut), Astrocaryum murumuru (murumuru), Astrocaryum vulgare (tucumã), Attalea geraensis (Indaiá-rateiro), Attalea humilis (American oil palm), Attalea oleifera (andaiá), Attalea phalerata (uricuri), Attalea speciosa (babassu), Avena sativa (oats), Beta vulgaris (sugar beet), Brassica sp. such as Brassica carinata, Brassica juncea, Brassica napobrassica, Brassica napus (canola), Camelina sativa (false flax), Cannabis sativa (hemp), Carthamus tinetorius (safflower), Caryocar brasiliense (pequi), Cocos nucifora (Coconut), Crambe abyssinica (Abyssinian kale), Cucumis melo (melon), Elaeis guineensis (African palm), Glycine max (soybean), Gossypium hirsutum (cotton), Helianthus sp. such as Helianthus annuus (sunflower), Hordeum vulgare (barley), Jatropha curcas (physic nut), Joannesia princeps (arara nut-tree), Lemna sp. (duckweed) such as Lemna aequinoctialis, Lemna disperma, Lemna ecuadoriensis, Lemna gibba (swollen duckweed), Lemna japonica, Lonna minor, Lemna minuta, Lemna obscura, Lonna paucicostata, Lemna perpusilla, Lemna tenera, Lemna trisulca, Lemna turionifera, Lemna valdiviana, Lemna yungensis, Licania rigida (oiticica), Linum usitatissimum (flax), Lupinus angustifolius (lupin), Mauritia flexuosa (buriti palm), Maximiliana maripa (inaja palm), Miscanthus sp. such as Miscanthus×giganteus and Miscanthus sinensis, Nicotiana sp. (tabacco) such as Nicotiana tabacum or Nicotiana benthamiana, Oenocarpus bacaba (bacaba-do-azeite), Oenocarpus bataua (patauã), Oenocarpus distichus (bacaba-de-leque), Oryza sp. (rice) such as Oryza sativa and Oryza glaberrima, Panicum virgatum (switchgrass), Paraqueiba paraensis (mari), Persea amencana (avocado), Pongamia pinnata (Indian beech), Populus trichocarpa, Ricinus communis (castor), Saccharum sp. (sugarcane), Sesamum indicum (sesame), Solanum tuberosum (potato), Sorghum sp. such as Sorghum bicolor, Sorghum vulgare, Theobroma grandiforum (cupuassu), Trifolium sp., Trithrinax brasiliensis (Brazilian needle palm), Triticum sp. (wheat) such as Triticum aestivum, Zea mays (corn), alfalfa (Medicago sativa), rye (Secale cerale), sweet potato (Lopmoea batatus), cassava (Manihot esculenta), coffee (Cofea spp.), pineapple (Anana comosus), citris tree (Citrus spp.), cocoa (Theobroma cacao), tea (Camellia senensis), banana (Musa spp.), avocado (Persea americana), fig (Ficus casica), guava (Psidium guajava), mango (Mangifer indica), olive (Olea europaea), papaya (Carica papaya), cashew (Anacardium occidentale), macadamia (Macadamia intergrifolia) and almond (Prunus amygdalus).

[0981] In an embodiment, the plant is not a Nicotiana sp.

[0982] Other preferred plants include C4 grasses such as, in addition to those mentioned above, Andropogon gerardi, Bouteloua curtipendula, B. gracilis, Buchloe dactyloides, Schizachyrium scoparium, Sorghastrum nutans, Sporobolus cryptandrus; C3 grasses such as Elymus canadensis, the legumes Lespedeza capitata and Petalostemum villosum, the forb Aster azureus; and woody plants such as Quercus ellipsoidalis and Q. macrocarpa. Other preferred plants include C3 grasses.

[0983] In a preferred embodiment, the plant is an angiosperm.

[0984] In an embodiment, the plant is an oilseed plant, preferably an oilseed crop plant. As used herein, an “oilseed plant” is a plant species used for the commercial production of lipid from the seeds of the plant. The oilseed plant may be, for example, oil-seed rape (such as canola), maize, sunflower, safflower, soybean, sorghum, flax (linseed) or sugar beet. Furthermore, the oilseed plant may be other Brassicas, cotton, peanut, poppy, rutabaga, mustard, castor bean, sesame, safflower, Jatropha curcas or nut producing plants. The plant may produce high levels of lipid in its fruit such as olive, oil palm or coconut. Horticultural plants to which the present invention may be applied are lettuce, endive, or vegetable Brassicas including cabbage, broccoli, or cauliflower. The present invention may be applied in tobacco, cucurbits, carrot, strawberry, tomato, or pepper.

[0985] In a preferred embodiment, the plant is a member of the family Fabaceae (or Leguminosae) such as alfalfa, clover, peas, lucerne, beans, lentils, lupins, mesquite, carob, soybeans, and peanuts, or a member of the family Poaceae such as corn, sorghum, wheat, barley and oats. In a particularly preferred embodiment, the plant is alfalfa, clover, corn or sorghum, each of which are particularly useful for forage or fodder for animals.

[0986] In a preferred embodiment, the transgenic plant is homozygous for each and every gene that has been introduced (transgene) so that its progeny do not segregate for the desired phenotype. The transgenic plant may also be heterozygous for the introduced transgene(s), preferably uniformly heterozygous for the transgene such as for example, in F1 progeny which have been grown from hybrid seed. Such plants may provide advantages such as hybrid vigour, well known in the art.

### Transformation of Plants

[0987] Transgenic plants can be produced using techniques known in the art, such as those generally described in Slater et al., Plant Biotechnology—The Genetic Manipulation of Plants, Oxford University Press (2003), and Christou and Klee, Handbook of Plant Biotechnology, John Wiley and Sons (2004).

[0988] As used herein, the terms “stably transforming”, “stably transformed” and variations thereof refer to the integration of the polynucleotide into the genome of the cell such that they are transferred to progeny cells during cell division without the need for positively selecting for their presence. Stable transformants, or progeny thereof, can be identified by any means known in the art such as Southern blots on chromosomal DNA, or in situ hybridization of genomic DNA, enabling their selection.

[0989] Agrobacterium-mediated transfer is a widely applicable system for introducing genes into plant cells because DNA can be introduced into cells in whole plant tissues, plant organs, or explants in tissue culture, for either transient expression, or for stable integration of the DNA in the plant cell genome. For example, floral-dip (in planta) methods may be used. The use of Agrobacterium-mediated plant integrating vectors to introduce DNA into plant cells is well known in the art. The region of DNA to be transferred is defined by the border sequences, and the intervening DNA (T-DNA) is usually inserted into the plant genome. It is the method of choice because of the facile and defined nature of the gene transfer.

[0990] Acceleration methods that may be used include for example, microprojectile bombardment and the like. One example of a method for delivering transforming nucleic acid molecules to plant cells is microprojectile bombardment. This method has been reviewed by Yang et al., Particle Bombardment Technology for Gene Transfer, Oxford Press, Oxford, England (1994). Non-biological particles (microprojectiles) that may be coated with nucleic acids and delivered into cells, for example of immature embryos, by a propelling force. Exemplary particles include those comprised of tungsten, gold, platinum, and the like.

[0991] In another method, plastids can be stably transformed. Methods disclosed for plastid transformation in higher plants include particle gun delivery of DNA containing a selectable marker and targeting of the DNA to the plastid genome through homologous recombination (U.S. Pat. No. 5,451,513, U.S. Pat. No. 5,545,818, U.S. Pat. No. 5,877,402, U.S. Pat. No. 5,932,479, and WO 99/05265). Other methods of cell transformation can also be used and include but are not limited to the introduction of DNA into plants by direct DNA transfer into pollen, by direct injection of DNA into reproductive organs of a plant, or by direct injection of DNA into the cells of immature embryos followed by the rehydration of desiccated embryos.

[0992] The regeneration, development, and cultivation of plants from single plant protoplast transformants or from various transformed explants is well known in the art (Weissbach et al., In: Methods for Plant Molecular Biology, Academic Press, San Diego, Calif., (1988)). This regeneration and growth process typically includes the steps of selection of transformed cells, culturing those individualized cells through the usual stages of embryonic development through the rooted plantlet stage. Transgenic embryos and seeds are similarly regenerated. The resulting transgenic rooted shoots are thereafter planted in an appropriate plant growth medium such as soil.

[0993] The development or regeneration of plants containing the foreign, exogenous gene is well known in the art. Preferably, the regenerated plants are self-pollinated to provide homozygous transgenic plants. Otherwise, pollen obtained from the regenerated plants is crossed to seed-grown plants of agronomically important lines. Conversely, pollen from plants of these important lines is used to pollinate regenerated plants. A transgenic plant of the present invention containing a desired polynucleotide is cultivated using methods well known to one skilled in the art.

[0994] To confirm the presence of the transgenes in transgenic cells and plants, a polymerase chain reaction (PCR) amplification or Southern blot analysis can be performed using methods known to those skilled in the art. Expression products of the transgenes can be detected in any of a variety of ways, depending upon the nature of the product, and include Northern blot hybridisation, Western blot and enzyme assay. Once transgenic plants have been obtained, they may be grown to produce plant tissues or parts having the desired phenotype. The plant tissue or plant parts, may be harvested, and/or the seed collected. The seed may serve as a source for growing additional plants with tissues or parts having the desired characteristics. Preferably, the vegetative plant parts are harvested at a time when the yield of non-polar lipids are at their highest. In one embodiment, the vegetative plant parts are harvested about at the time of flowering, or after flowering has initiated. Preferably, the plant parts are harvested at about the time senescence begins, usually indicated by yellowing and drying of leaves.

[0995] Transgenic plants formed using Agrobacterium or other transformation methods typically contain a single genetic locus on one chromosome. Such transgenic plants can be referred to as being hemizygous for the added gene(s). More preferred is a transgenic plant that is homozygous for the added gene(s), that is, a transgenic plant that contains two added genes, one gene at the same locus on each chromosome of a chromosome pair. A homozygous transgenic plant can be obtained by self-fertilising a hemizygous transgenic plant, germinating some of the seed produced and analyzing the resulting plants for the gene of interest.

[0996] It is also to be understood that two different transgenic plants that contain two independently segregating exogenous genes or loci can also be crossed (mated) to produce offspring that contain both sets of genes or loci. Selfing of appropriate F1 progeny can produce plants that are homozygous for both of the exogenous genes or loci. Back-crossing to a parental plant and out-crossing with a non-transgenic plant are also contemplated, as is vegetative propagation. Similarly, a transgenic plant can be crossed with a second plant comprising a genetic modification such as a mutant gene and progeny containing both of the transgene and the genetic modification identified. Descriptions of other breeding methods that are commonly used for different traits and crops can be found in Fehr, In: Breeding Methods for Cultivar Development, Wilcox J. ed., American Society of Agronomy, Madison Wis. (1987).

### Tilling

[0997] In one embodiment, TILLING (Targeting Induced Local Lesions IN Genomes) can be used to produce plants in which endogenous genes comprise a mutation, for example genes encoding an SDP1 or TGD polypeptide, TST, a plastidial GPAT, plastidial LPAAT, phosphatidic acid phosphatase (PAP), or a combination of two or more thereof. In a first step, introduced mutations such as novel single base pair changes are induced in a population of plants by treating seeds (or pollen) with a chemical mutagen, and then advancing plants to a generation where mutations will be stably inherited. DNA is extracted, and seeds are stored from all members of the population to create a resource that can be accessed repeatedly over time. For a TILLING assay, heteroduplex methods using specific endonucleases can be used to detect single nucleotide polymorphisms (SNPs). Alternatively, Next Generation Sequencing of DNA from pools of mutagenised plants can be used to identify mutants in the gene of choice. Typically, a mutation frequency of one mutant per 1000 plants in the mutagenised population is achieved. Using this approach, many thousands of plants can be screened to identify any individual with a single base change as well as small insertions or deletions (1-30 bp) in any gene or specific region of the genome. TILLING is further described in Slade and Knauf (2005), and Henikoff et al. (2004).

[0998] In addition to allowing efficient detection of mutations, high-throughput TILLING technology is ideal for the detection of natural polymorphisms. Therefore, interrogating an unknown homologous DNA by heteroduplexing to a known sequence reveals the number and position of polymorphic sites. Both nucleotide changes and small insertions and deletions are identified, including at least some repeat number polymorphisms. This has been called Ecotilling (Comai et al., 2004).

### Genome Editing Using Site-Specific Nucleases

[0999] Genome editing uses engineered nucleases such as RNA guided DNA endonucleases or nucleases composed of sequence specific DNA binding domains fused to a non-specific DNA cleavage module. These engineered nucleases enable efficient and precise genetic modifications by inducing targeted DNA double stranded breaks that stimulate the cell's endogenous cellular DNA repair mechanisms to repair the induced break. Such mechanisms include, for example, error prone non-homologous end joining (NHEJ) and homology directed repair (HDR).

[1000] In the presence of donor plasmid with extended homology arms, HDR can lead to the introduction of single or multiple transgenes to correct or replace existing genes. In the absence of donor plasmid, NHEJ-mediated repair yields small insertion or deletion mutations of the target that cause gene disruption.

[1001] Engineered nucleases useful in the methods of the present invention include zinc finger nucleases (ZFNs), transcription activator-like (TAL) effector nucleases (TALEN) and CRISPR/Cas9 type nucleases, and related nucleases.

[1002] Typically nuclease encoded genes are delivered into cells by plasmid DNA, viral vectors or in vitro transcribed mRNA.

[1003] A zinc finger nuclease (ZFN) comprises a DNA-binding domain and a DNA-cleavage domain, wherein the DNA binding domain is comprised of at least one zinc finger and is operatively linked to a DNA-cleavage domain. The zinc finger DNA-binding domain is at the N-terminus of the protein and the DNA-cleavage domain is located at the C-terminus of said protein.

[1004] A ZFN must have at least one zinc finger. In a preferred embodiment, a ZFN would have at least three zinc fingers in order to have sufficient specificity to be useful for targeted genetic recombination in a host cell or organism. Typically, a ZEN having more than three zinc fingers would have progressively greater specificity with each additional zinc finger.

[1005] The zinc finger domain can be derived from any class or type of zinc finger. In a particular embodiment, the zinc finger domain comprises the Cis₂His₂ type of zinc finger that is very generally represented, for example, by the zinc finger transcription factors TFIIIA or Sp1. In a preferred embodiment, the zinc finger domain comprises three Cis₂His₂ type zinc fingers. The DNA recognition and/or the binding specificity of a ZFN can be altered in order to accomplish targeted genetic recombination at any chosen site in cellular DNA. Such modification can be accomplished using known molecular biology and/or chemical synthesis techniques. (see, for example, Bibikova et al., 2002).

[1006] The ZFN DNA-cleavage domain is derived from a class of non-specific DNA cleavage domains, for example the DNA-cleavage domain of a Type II restriction enzyme such as Fold (Kim et al., 1996). Other useful endonucleases may include, for example, HhaI, HindIII, Nod, BbvCI, EcoRI, BglI, and AlwI.

[1007] A transcription activator-like (TAL) effector nuclease (TALEN) comprises a TAL effector DNA binding domain and an endonuclease domain.

[1008] TAL effectors are proteins of plant pathogenic bacteria that are injected by the pathogen into the plant cell, where they travel to the nucleus and function as transcription factors to turn on specific plant genes. The primary amino acid sequence of a TAL effector dictates the nucleotide sequence to which it binds. Thus, target sites can be predicted for TAL effectors, and TAL effectors can be engineered and generated for the purpose of binding to particular nucleotide sequences.

[1009] Fused to the TAL effector-encoding nucleic acid sequences are sequences encoding a nuclease or a portion of a nuclease, typically a nonspecific cleavage domain from a type II restriction endonuclease such as FokI (Kim et al., 1996). Other useful endonucleases may include, for example, HhaI, HindIII, Nod, BbvCI, EcoRI, BglI, and AlwI. The fact that some endonucleases (e.g., Fold) only function as dimers can be capitalized upon to enhance the target specificity of the TAL effector. For example, in some cases each FokI monomer can be fused to a TAL effector sequence that recognizes a different DNA target sequence, and only when the two recognition sites are in close proximity do the inactive monomers come together to create a functional enzyme. By requiring DNA binding to activate the nuclease, a highly site-specific restriction enzyme can be created.

[1010] A sequence-specific TALEN can recognize a particular sequence within a preselected target nucleotide sequence present in a cell. Thus, in some embodiments, a target nucleotide sequence can be scanned for nuclease recognition sites, and a particular nuclease can be selected based on the target sequence. In other cases, a TALEN can be engineered to target a particular cellular sequence.

### Genome Editing Using Programmable RNA-Guided DNA Endonucleases

[1011] Distinct from the site-specific nucleases described above, the clustered regulatory interspaced short palindromic repeats (CRISPR)/Cas system provides an alternative to ZFNs and TALENs for inducing targeted genetic alterations, via RNA-guided DNA cleavage.

[1012] CRISPR systems rely on CRISPR RNA (crRNA) and transactivating chimeric RNA (tracrRNA) for sequence-specific cleavage of DNA. Three types of CRISPR/Cas systems exist: in type II systems, Cas9 serves as an RNA-guided DNA endonuclease that cleaves DNA upon crRNA-tracrRNA target recognition. CRISPR RNA base pairs with tracrRNA to form a two-RNA structure that guides the Cas9 endonuclease to complementary DNA sites for cleavage.

[1013] The CRISPR system can be portable to plant cells by co-delivery of plasmids expressing the Cas endonuclease and the necessary crRNA components. The Cas endonuclease may be converted into a nickase to provide additional control over the mechanism of DNA repair (Cong et al., 2013).

[1014] CRISPRs are typically short partially palindromic sequences of 24-40 bp containing inner and terminal inverted repeats of up to 11 bp. Although isolated elements have been detected, they are generally arranged in clusters (up to about 20 or more per genome) of repeated units spaced by unique intervening 20-58 bp sequences. CRISPRs are generally homogenous within a given genome with most of them being identical. However, there are examples of heterogeneity in, for example, the Archaea (Mojica et al., 2000).

### Feedstuffs

[1015] The present invention includes compositions which can be used as feedstuffs. For purposes of the present invention, “feedstuffs” include any food or preparation for animal (including human) consumption and which serves to nourish or build up tissues or supply energy, and/or to maintain, restore or support adequate nutritional status or metabolic function. Feedstuffs of the invention include nutritional compositions for babies and/or young children.

[1016] As used herein, the term “animal” refers to any eukaryotic organism capable of ingesting plant derived material. In an embodiment, the animal is a ruminant animal (cattle, sheep, goats etc). Alternatively, the animal is a non-ruminant animal. In one embodiment, the animal is a mammal. In an embodiment, the animal is a human. In an embodiment, the animal is a livestock animal such, but not limited to, as cattle, goats, sheep, pigs, horses, poultry such as chickens and the like. In an embodiment, the cattle are diary cattle or beef cattle. In another embodiment, the animal is a fish, for instance fish bred using aquaculture including, but not limited to, salmon, trout, carp, bass, bream, turbot, sole, milkfish, grey mullet, grouper, flounder, sea bass, cod, haddock, Japanese flounder, catfish, char, whitefish, sturgeon, tench, roach, pike, pike-perch, yellowtail, tilapia, eel or tropical fish (such as the fresh, brackish, and salt water tropical fish). The animal may be a crustacean such as, but not limited to, krill, clams, shrimp (including prawns), crab, and lobster.

[1017] Feedstuffs of the invention may comprise for example, a plant or part thereof such as a vegetative plant part of the invention along with a suitable carrier(s). The term “carrier” is used in its broadest sense to encompass any component which may or may not have nutritional value. As the person skilled in the art will appreciate, the carrier must be suitable for use (or used in a sufficiently low concentration) in a feedstuff, such that it does not have deleterious effect on an organism which consumes the feedstuff. Feedstuffs may comprise plant parts which have been harvested and subsequently processed or treated, for example, by chopping, cutting, drying, pressing or pelleting the plant parts, into a form that is suitable for consumption by the animal, or altered by processes such as drying or fermentation to produce hay or silage.

[1018] The feedstuff of the present invention comprises a lipid and/or protein produced directly or indirectly by use of the methods, plants or parts thereof disclosed herein. The composition may either be in a solid or liquid form. Additionally, the composition may include edible macronutrients, vitamins, and/or minerals in amounts desired for a particular use. The amounts of these ingredients will vary depending on whether the composition is intended for use with normal individuals or for use with individuals having specialized needs such as individuals suffering from metabolic disorders and the like.

[1019] Examples of suitable carriers with nutritional value include, but are not limited to, macronutrients such as edible fats, carbohydrates and proteins. Examples of such edible fats include, but are not limited to, coconut oil, borage oil, fungal oil, black current oil, soy oil, and mono- and di-glycerides. Examples of such carbohydrates include, but are not limited to, glucose, edible lactose, and hydrolyzed starch. Additionally, examples of proteins which may be utilized in the nutritional composition of the invention include, but are not limited to, soy proteins, electrodialysed whey, electrodialysed skim milk, milk whey, or the hydrolysates of these proteins.

[1020] With respect to vitamins and minerals, the following may be added to the feedstuff compositions of the present invention, calcium, phosphorus, potassium, sodium, chloride, magnesium, manganese, iron, copper, zinc, selenium, iodine, and vitamins A, E, D, C, and the B complex. Other such vitamins and minerals may also be added.

[1021] A feedstuff composition of the present invention may also be added to food even when supplementation of the diet is not required. For example, the composition may be added to food of any type, including, but not limited to, margarine, butter, cheeses, milk, yogurt, chocolate, candy, snacks, salad oils, cooking oils, cooking fats, meats, fish and beverages.

[1022] Additionally, material produced in accordance with the present invention may also be used as animal food supplements to alter an animal's tissue or milk fatty acid composition to one more desirable for human or animal consumption, or to reduce methane production in ruminant animals. Furthermore, feedstuffs of the invention can be used in aquaculture to increase the levels of fatty acids and nutrition in fish for human or animal consumption.

[1023] Preferred feedstuffs of the invention are the plants, seed and other plant parts such as leaves, fruits and stems which may be used directly as food or feed for humans or other animals. For example, animals may graze directly on such plants grown in the field, or be fed more measured amounts in controlled feeding. The invention includes the use of such plants and plant parts as feed for increasing the polyunsaturated fatty acid levels in humans and other animals.

[1024] For consumption by non-human animals the feedstuff may be in any suitable form for such as, but not limited to, silage, hay or pasture growing in a field. In an embodiment, the feedstuff for non-human consumption is a leguminous plant, or part thereof, which is a member of the family Fabaceae family (or Leguminosae) such as alfalfa, clover, peas, lucerne, beans, lentils, lupins, mesquite, carob, soybeans, and peanuts.

[1025] In embodiment, the animal is in a feedlot and/or a shed.

[1026] In an embodiment, the plant or fraction thereof comprises at least about 5%, at least about 10%, at least about 50%, at least about 75%, at least about 90% or all of the feedstuff.

### Silage

[1027] As used herein, “silage” is a relatively high-moisture fodder which has been produced and stored in a process called ensilage and which is typically fed to cattle, sheep or other ruminants. During the storage time, carbohydrates, lipids and proteins in the plant material ferment, producing organic acids, or are broken down oxidatively, or both. The plant material upon harvest and the post-fermentation plant materials are both included in silage as the term is used herein. Silage is typically made from grass crops such as maize, sorghum, oats or other cereals, or from mixed pasture grasses and legumes such as alfalfa or clover, using the green, above-ground parts of the plants. Silage is made either by placing cut vegetation (usually the whole above-ground plant biomass which can include reproductive tissues) in a pit or silo or other means for storage, and compressing it down so as to leave as little air as possible with the plant material. Oxygen is excluded to some extent by covering it with a plastic sheet or by wrapping the plant material tightly within plastic film (baling) to reduce air inflow. Silage is made from plant material with a suitable moisture content, generally about 50% to 60% of the fresh weight, depending on the means of storage and the degree of compression used and the amount of water that will be lost in storage, but not exceeding 75%. For sorghum and corn, harvest begins when the whole-plant moisture is at a suitable level, ideally a few days before it is ripe. For pasture-type crops, the plants are mowed and allowed to wilt for a day or so until the moisture content drops to a suitable level. Ideally the crop is mowed when in full flower and deposited in the pit or silo on the day of its cutting. At harvesting, or after, the plant material is shredded or chopped by the harvester into pieces typically about 1-5 cm long. The plant material may be placed in large heaps on the ground and compressed to reduce the amount of air, then covered with plastic, or into a silo. Alternatively, the plant material may be baled in plastic wrapping to exclude air, which typically requires a lower moisture content of about 30-40%, but still too damp to be stored as dry hay.

[1028] The cut or chopped, stored plant material undergoes mostly anaerobic fermentation, which starts about 48 hours after the pit or silo is filled. The fermentation process converts sugars and other carbohydrates such as hemicellulose to organic acids, mostly acetic, propionic, lactic and butyric acids. Fermentation starts after the trapped oxygen is consumed and is essentially complete after about two weeks of storage, or may continue for longer periods. When the plant material is closely packed, the supply of oxygen is limited and the fermentation results in the decomposition of the carbohydrates, some lipids and proteins in the material into the organic acids. This product is named sour silage. If, on the other hand, the fodder is more loosely packed, the main reaction is oxidation which proceeds more rapidly and the temperature rises. If the mass is compressed when the temperature is 60-75 C, the reaction ceases and sweet silage results. Fermentation may be aided by inoculation with specific microorganisms such as lactic acid bacteria to speed fermentation or improve the resulting silage, e.g. with Lactobacillus plantarum.

[1029] Bulk silage is commonly fed to dairy cattle, while baled silage tends to be used for beef cattle, sheep and horses. The advantages of silage as animal feed are several. During fermentation, the silage bacteria act on the cellulose and other carbohydrates in the forage to produce the organic fatty acids, thereby lowering the pH. This inhibits competing bacteria that might cause spoilage and the organic acids thereby act as natural preservatives, improve digestibility and palatability. This preservative action is particularly important during winter in temperate regions, when green forage is unavailable.

[1030] Silage can be produced using techniques known in the art such as those described in CN 101940272 CN 103461658 CN 101946853, CN 101946853, CN 104381743, U.S. Pat. No. 3,875,304 and U.S. Pat. No. 6,224,916. Pellets for animal feed can be produced using techniques known in the art such as those described in U.S. Pat. No. 3,035,920, U.S. Pat. No. 3,573,924 and U.S. Pat. No. 5,871,802.

### Plant Biomass

[1031] An increase in the total lipid content of plant biomass equates to greater energy content, making its use as a feed or forage or in the production of biofuel more economical.

[1032] The main components of naturally occurring plant biomass are carbohydrates (approximately 75%, dry weight) and lignin (approximately 25%), which can vary with plant type. The carbohydrates are mainly cellulose or hemicellulose fibers, which impart strength to the plant structure, and lignin, which holds the fibers together. Plant biomass typically has a low energy density as a result of both its physical form and moisture content. This also makes it inconvenient and inefficient for storage and transport without some kind of pre-processing. There are a range of processes available to convert it into a more convenient form including: 1) physical pre-processing (for example, grinding) or 2) conversion by thermal (for example, combustion, gasification, pyrolysis) or chemical (for example, anaerobic digestion, fermentation, composting, transesterification) processes. In this way, the biomass is converted into what can be described as a biomass fuel.

### Combustion

[1033] Combustion is the process by which flammable materials are allowed to burn in the presence of air or oxygen with the release of heat. The basic process is oxidation.

[1034] Combustion is the simplest method by which biomass can be used for energy, and has been used to provide heat. This heat can itself be used in a number of ways: 1) space heating, 2) water (or other fluid) heating for central or district heating or process heat, 3) steam raising for electricity generation or motive force. When the flammable fuel material is a form of biomass the oxidation is of predominantly the carbon (C) and hydrogen (H) in the cellulose, hemicellulose, lignin, and other molecules present to form carbon dioxide (CO₂) and water (H₂O). The plants of the invention provide improved fuel for combustion by virtue of the increased lipid content.

### Gasification

[1035] Gasification is a partial oxidation process whereby a carbon source such as plant biomass, is broken down into carbon monoxide (CO) and hydrogen (H₂), plus carbon dioxide (CO₂) and possibly hydrocarbon molecules such as methane (CH₄). If the gasification takes place at a relatively low temperature, such as 700° C. to 1000° C., the product gas will have a relatively high level of hydrocarbons compared to high temperature gasification. As a result it may be used directly, to be burned for heat or electricity generation via a steam turbine or, with suitable gas clean up, to run an internal combustion engine for electricity generation. The combustion chamber for a simple boiler may be close coupled with the gasifier, or the producer gas may be cleaned of longer chain hydrocarbons (tars), transported, stored and burned remotely. A gasification system may be closely integrated with a combined cycle gas turbine for electricity generation (IGCC—integrated gasification combined cycle). Higher temperature gasification (1200° C. to 1600° C.) leads to few hydrocarbons in the product gas, and a higher proportion of CO and H₂. This is known as synthesis gas (syngas or biosyngas) as it can be used to synthesize longer chain hydrocarbons using techniques such as Fischer-Tropsch (FT) synthesis. If the ratio of H₂ to CO is correct (2:1) FT synthesis can be used to convert syngas into high quality synthetic diesel biofuel which is compatible with conventional fossil diesel and diesel engines.

### Pyrolysis

[1036] As used herein, the term “pyrolysis” means a process that uses slow heating in the absence of oxygen to produce gaseous, oil and char products from biomass. Pyrolysis is a thermal or thermo-chemical conversion of lipid-based, particularly triglyceride-based, materials. The products of pyrolysis include gas, liquid and a sold char, with the proportions of each depending upon the parameters of the process. Lower temperatures (around 400° C.) tend to produce more solid char (slow pyrolysis), whereas somewhat higher temperatures (around 500° C.) produce a much higher proportion of liquid (bio-oil), provided the vapour residence time is kept down to around 1 s or less. Temperatures of about 275° C. to about 375° C. can be used to produce liquid bio-oil having a higher proportion of longer chain hydrocarbons. Pyrolysis involves direct thermal cracking of the lipids or a combination of thermal and catalytic cracking. At temperatures of about 400-500° C., cracking occurs, producing short chain hydrocarbons such as alkanes, alkenes, alkadienes, aromatics, olefins and carboxylic acid, as well as carbon monoxide and carbon dioxide.

[1037] Four main catalyst types can be used including transition metal catalysts, molecular sieve type catalysts, activated alumina and sodium carbonate (Maher et al., 2007). Examples are given in U.S. Pat. No. 4,102,938. Alumina (Al₂O₃) activated by acid is an effective catalyst (U.S. Pat. No. 5,233,109). Molecular sieve catalysts are porous, highly crystalline structures that exhibit size selectivity, so that molecules of only certain sizes can pass through. These include zeolite catalysts such as ZSM-5 or HZSM-5 which are crystalline materials comprising AlO₄ and SiO₄ and other silica-alumina catalysts. The activity and selectivity of these catalysts depends on the acidity, pore size and pore shape, and typically operate at 300-500° C. Transition metal catalysts are described for example in U.S. Pat. No. 4,992,605. Sodium carbonate catalyst has been used in the pyrolysis of oils (Dandik and Aksoy, 1998).

[1038] As used herein, “hydrothermal processing”, “HTP”, also referred to as “thermal depolymerisation” is a form of pyrolysis which reacts the plant-derived matter, specifically the carbon-containing material in the plant-derived matter, with hydrogen to produce a bio-oil product comprised predominantly of paraffinic hydrocarbons along with other gases and solids. A significant advantage of HTP is that the vegetative plant material does not need to be dried before forming the composition for the conversion reaction, although the vegetative plant material can be dried beforehand to aid in transport or storage of the biomass. The biomass can be used directly as harvested from the field. The reactor is any vessel which can withstand the high temperature and pressure used and is resistant to corrosion. The solvent used in the HTP includes water or is entirely water, or may include some hydrocarbon compounds in the form of an oil. Generally, the solvent in HTP lacks added alcohols. The conversion reaction may occur in an oxidative, reductive or inert environment. “Oxidative” as used herein means in the presence of air, “reductive” means in the presence of a reducing agent, typically hydrogen gas or methane, for example 10-15% H₂ with the remainder of the gas being N₂, and “inert” means in the presence of an inert gas such as nitrogen or argon. The conversion reaction is preferably carried out under reductive conditions. The carbon-containing materials that are converted include cellulose, hemi-cellulose, lignin and proteins as well as lipids. The process uses a conversion temperature of between 270° C. and 400° C. and a pressure of between 70 and 350 bar, typically 300° C. to 350° C. and a pressure between 100-170 bar. As a result of the process, organic vapours, pyrolysis gases and charcoal are produced. The organic vapours are condensed to produce the bio-oil. Recovery of the bio-oil may be achieved by cooling the reactor and reducing the pressure to atmospheric pressure, which allows bio-oil (organic) and water phases to develop and the bio-oil to be removed from the reactor.

[1039] The yield of the recovered bio-oil is calculated as a percentage of the dry weight of the input biomass on a dry weight basis. It is calculated according to the formula: weight of bio-oil×100/dry weight of the vegetative plant parts. The weight of the bio-oil does not include the weight of any water or solids which may be present in a bio-oil mixture, which are readily removed by filtration or other known methods.

[1040] The bio-oil may then be separated into fractions by fractional distillation, with or without additional refining processes. Typically, the fractions that condense at these temperatures are termed: about 370° C., fuel oil; about 300° C., diesel oil; about 200° C., kerosene; about 150° C., gasoline (petrol). Heavier fractions may be cracked into lighter, more desirable fractions, well known in the art. Diesel fuel typically is comprised of C13-C22 hydrocarbon compounds.

### Transesterification

[1041] “Transesterification” as used herein is the conversion of lipids, principally triacylglycerols, into fatty acid methyl esters or ethyl esters by reaction with short chain alcohols such as methanol or ethanol, in the presence of a catalyst such as alkali or acid. Methanol is used more commonly due to low cost and availability, but ethanol, propanol or butanol or mixtures of the alcohols can also be used. The catalysts may be homogeneous catalysts, heterogeneous catalysts or enzymatic catalysts. Homogeneous catalysts include ferric sulphate followed by KOH. Heterogeneous catalysts include CaO, K₃PO₄, and WO₃/ZrO₂. Enzymatic catalysts include Novozyme 435 produced from Candida antarctica.

[1042] Transesterification can be carried out on extracted oil, or preferably directly in situ in the vegetative plant material. The vegetative plant parts may be dried and milled prior to being used to prepare the composition for the conversion reaction, but does not need to be. The advantage of direct conversion to fatty acid esters, preferably FAME, is that the conversion can use lower temperatures and pressures and still provide good yields of the product, for example, comprising at least 50% FAME by weight. The yield of recovered bio-oil by transesterification is calculated as for the HTP process.

### Production of Non-Polar Lipids

[1043] Techniques that are routinely practiced in the art can be used to extract, process, purify and analyze the lipids such as the TAG produced by plants or parts thereof of the instant invention. Such techniques are described and explained throughout the literature in sources such as, Fereidoon Shahidi, Current Protocols in Food Analytical Chemistry, John Wiley & Sons, Inc. (2001) D1.1.1-D1.1.11, and Perez-Vich et al. (1998).

Production of Oil from Vegetative Plant Parts or Seed

[1044] Typically, vegetative plant parts or plant seeds are cooked, pressed, and/or extracted to produce crude vegetative oil or seedoil, which is then degummed, refined, bleached, and deodorized. Generally, techniques for crushing seed are known in the art. For example, oilseeds can be tempered by spraying them with water to raise the moisture content to, for example, 8.5%, and flaked using a smooth roller with a gap setting of 0.23 to 0.27 mm. Depending on the type of seed, water may not be added prior to crushing. Application of heat deactivates enzymes, facilitates further cell rupturing, coalesces the lipid droplets, and agglomerates protein particles, all of which facilitate the extraction process. Vegetative plant parts can be similarly treated, depending on the moisture content.

[1045] In an embodiment, the majority of the vegetative oil or seedoil is released by passage through a screw press. Cakes (vegetative plant meal, seedmeal) expelled from the screw press may then be solvent extracted for example, with hexane, using a heat traced column, or not be solvent treated, in which case it may be more suitable as animal feed. Alternatively, crude vegetative oil or seedoil produced by the pressing operation can be passed through a settling tank with a slotted wire drainage top to remove the solids that are expressed with the vegetative oil or seedoil during the pressing operation. The clarified vegetative oil or seedoil can be passed through a plate and frame filter to remove any remaining fine solid particles. Once the solvent is stripped from the crude oil, the pressed and extracted portions are combined and subjected to normal lipid processing procedures (i.e., degumming, caustic refining, bleaching, and deodorization).

[1046] Extraction of the lipid from vegetative plant parts of the invention uses analogous methods to those known in the art for seedoil extraction. One way is physical extraction, which often does not use solvent extraction. Expeller pressed extraction is a common type, as are the screw press and ram press extraction methods. Mechanical extraction is typically less efficient than solvent extraction where an organic solvent (e.g., hexane) is mixed with at least the plant biomass, preferably after the biomass is dried and ground. The solvent dissolves the lipid in the biomass, which solution is then separated from the biomass by mechanical action (e.g., with the pressing processes above). This separation step can also be performed by filtration (e.g., with a filter press or similar device) or centrifugation etc. The organic solvent can then be separated from the non-polar lipid (e.g., by distillation). This second separation step yields non-polar lipid from the plant and can yield a re-usable solvent if one employs conventional vapor recovery. In an embodiment, the oil and/or protein content of the plant part or seed is analysed by near-infrared reflectance spectroscopy as described in Horn et al. (2007) prior to extraction.

[1047] If the vegetative plant parts are not to be used immediately to extract the lipid it is preferably processed to ensure the lipid content is retained as much as possible (see, for example, Christie, 1993), such as by drying the vegetative plant parts.

### Degumming

[1048] Degumming is an early step in the refining of oils and its primary purpose is the removal of most of the phospholipids from the oil, which may be present as approximately 1-2% of the total extracted lipid. Addition of ˜2% of water, typically containing phosphoric acid, at 70-80° C. to the crude oil results in the separation of most of the phospholipids accompanied by trace metals and pigments. The insoluble material that is removed is mainly a mixture of phospholipids and triacylglycerols and is also known as lecithin. Degumming can be performed by addition of concentrated phosphoric acid to the crude oil to convert non-hydratable phosphatides to a hydratable form, and to chelate minor metals that are present. Gum is separated from the oil by centrifugation. The oil can be refined by addition of a sufficient amount of a sodium hydroxide solution to titrate all of the fatty acids and removing the soaps thus formed.

### Alkali Refining

[1049] Alkali refining is one of the refining processes for treating crude oil, sometimes also referred to as neutralization. It usually follows degumming and precedes bleaching. Following degumming, the oil can treated by the addition of a sufficient amount of an alkali solution to titrate all of the fatty acids and phosphoric acids, and removing the soaps thus formed. Suitable alkaline materials include sodium hydroxide, potassium hydroxide, sodium carbonate, lithium hydroxide, calcium hydroxide, calcium carbonate and ammonium hydroxide. This process is typically carried out at room temperature and removes the free fatty acid fraction. Soap is removed by centrifugation or by extraction into a solvent for the soap, and the neutralised oil is washed with water. If required, any excess alkali in the oil may be neutralized with a suitable acid such as hydrochloric acid or sulphuric acid.

### Bleaching

[1050] Bleaching is a refining process in which oils are heated at 90-120° C. for 10-30 minutes in the presence of a bleaching earth (0.2-2.0%) and in the absence of oxygen by operating with nitrogen or steam or in a vacuum. This step in oil processing is designed to remove unwanted pigments (carotenoids, chlorophyll, gossypol etc), and the process also removes oxidation products, trace metals, sulphur compounds and traces of soap.

### Deodorization

[1051] Deodorization is a treatment of oils and fats at a high temperature (200-260° C.) and low pressure (0.1-1 mm Hg). This is typically achieved by introducing steam into the oil at a rate of about 0.1 ml/minute/100 ml of oil. Deodorization can be performed by heating the oil to 260° C. under vacuum, and slowly introducing steam into the oil at a rate of about 0.1 ml/minute/100 ml of oil. After about 30 minutes of sparging, the oil is allowed to cool under vacuum. The oil is typically transferred to a glass container and flushed with argon before being stored under refrigeration. If the amount of oil is limited, the oil can be placed under vacuum for example, in a Parr reactor and heated to 260° C. for the same length of time that it would have been deodorized. This treatment improves the colour of the oil and removes a majority of the volatile substances or odorous compounds including any remaining free fatty acids, monoacylglycerols and oxidation products.

### Winterisation

[1052] Winterization is a process sometimes used in commercial production of oils for the separation of oils and fats into solid (stearin) and liquid (olein) fractions by crystallization at sub-ambient temperatures. It was applied originally to cottonseed oil to produce a solid-free product. It is typically used to decrease the saturated fatty acid content of oils.

### Algae

[1053] Algae can produce 10 to 100 times as much mass as terrestrial plants in a year and can be cultured in open-ponds (such as raceway-type ponds and lakes) or in photobioreactors. The most common oil-producing algae can generally include the diatoms (bacillariophytes), green algae (chlorophytes), blue-green algae (cyanophytes), and golden-brown algae (chrysophytes). In addition a fifth group known as haptophytes may be used. Groups include brown algae and heterokonts. Specific non-limiting examples algae include the Classes: Chlorophyceae, Eustigmatophyceae, Prymnesiophyceae, Bacillariophyceae. Bacillariophytes capable of oil production include the genera Amphipleura, Amphora, Chaetoceros, Cyclotella, Cymbella, Fragilaria, Hantzschia, Navicula, Nitzschia, Phaeodactylum, and Thalassiosira. Specific non-limiting examples of chlorophytes capable of oil production include Ankistrodesmus, Botryococcus, Chlorella, Chlorococcum, Dunaliella, Monoraphidium, Oocystis, Scenedesmus, and Tetraselmis. In one aspect, the chlorophytes can be Chlorella or Dunaliella. Specific non-limiting examples of cyanophytes capable of oil production include Oscillatoria and Synechococcus. A specific example of chrysophytes capable of oil production includes Boekelovia. Specific non-limiting examples of haptophytes include Isochysis and Pleurochysis.

[1054] Specific algae useful in the present invention include, for example, Chlamydomonas sp. such as Chlamydomonas reinhardtii, Dunaliella sp. such as Dunaliella salina, Dunaliella tertiolecta, D. acidophila, D. Lateralis. D. martima. D. parva, D. polmorpha, D. primolecta, D. pseudosalina, D. quartolecta. D. viridis, Haematococcus sp., Chlorella sp. such as Chlorella vulgaris, Chlorella sorokiniana or Chlorella protothecoides, Thraustochytrium sp., Schizochytrium sp., Volvox sp, Nannochloropsis sp., Botryococcus braunii which can contain over 60 wt % lipid, Phaeodactylum tricornutum, Thalassiosira pseudonana, Isochrysis sp., Pavlova sp., Chlorococcum sp, Ellipsoidion sp., Neochloris sp., Scenedesmus sp.

[1055] Algae of the invention can be harvested using microscreens, by centrifugation, by flocculation (using for example, chitosan, alum and ferric chloride) and by froth flotation. Interrupting the carbon dioxide supply can cause algae to flocculate on its own, which is called “autoflocculation”. In froth flotation, the cultivator aerates the water into a froth, and then skims the algae from the top. Ultrasound and other harvesting methods are currently under development.

[1056] Lipid may be extracted from the algae by mechanical crushing. When algal mass is dried it retains its lipid content, which can then be “pressed” out with an oil press. Osmotic shock may also be used to release cellular components such as lipid from algae, and ultrasonic extraction can accelerate extraction processes. Chemical solvents (for example, hexane, benzene, petroleum ether) are often used in the extraction of lipids from algae. Enzymatic extraction using enzymes to degrade the cell walls may also be used to extract lipids from algae. Supercritical CO₂ can also be used as a solvent. In this method, CO₂ is liquefied under pressure and heated to the point that it becomes supercritical (having properties of both a liquid and a gas), allowing it to act as a solvent.

### Uses of Plant Lipids

[1057] The lipids produced by the methods described have a variety of uses. In some embodiments, the lipids are used as food oils. In other embodiments, the lipids are refined and used as lubricants or for other industrial uses such as the synthesis of plastics. In some preferred embodiments, the lipids are refined to produce biodiesel. Biodiesel can be made from oils derived from the plants, algae and fungi of the invention. Use of plant triacylglycerols for the production of biofuel is reviewed in Durrett et al. (2008). The resulting fuel is commonly referred to as biodiesel and has a dynamic viscosity range from 1.9 to 6.0 mm²s⁻¹ (ASTM D6751). Bioalcohol may produced from the fermentation of sugars or the biomass other than the lipid left over after lipid extraction. General methods for the production of biofuel can be found in, for example, Maher and Bressler (2007), Greenwell et al. (2010), Kaimakar et al. (2010), Alonso et al. (2010), Liu et al. (2010a). Gong and Jiang (2011), Endalew et al. (2011) and Semwal et al. (2011).

[1058] The present invention provides methods for increasing oil content in vegetative tissues. Plants of the present invention have increased energy content of leaves and/or stems such that the whole above-ground plant parts may be harvested and used to produce biofuel. Furthermore, the level of oleic acid is increased significantly while the polyunsaturated fatty acid alpha linolenic acid (ALA) was reduced. The plants, algae and fungi of the present invention thereby reduce the production costs of biofuel.

### Biodiesel

[1059] The production of biodiesel, or alkyl esters, is well known. There are three basic routes to ester production from lipids: 1) Base catalysed transesterification of the lipid with alcohol; 2) Direct acid catalysed esterification of the lipid with methanol; and 3) Conversion of the lipid to fatty acids, and then to alkyl esters with acid catalysis. Any method for preparing fatty acid alkyl esters and glyceryl ethers (in which one, two or three of the hydroxy groups on glycerol are etherified) can be used. For example, fatty acids can be prepared, for example, by hydrolyzing or saponifying TAG with acid or base catalysts, respectively, or using an enzyme such as a lipase or an esterase. Fatty acid alkyl esters can be prepared by reacting a fatty acid with an alcohol in the presence of an acid catalyst. Fatty acid alkyl esters can also be prepared by reacting TAG with an alcohol in the presence of an acid or base catalyst. Glycerol ethers can be prepared, for example, by reacting glycerol with an alkyl halide in the presence of base, or with an olefin or alcohol in the presence of an acid catalyst. The alkyl esters can be directly blended with diesel fuel, or washed with water or other aqueous solutions to remove various impurities, including the catalysts, before blending.

### Aviation Fuel

[1060] For improved performance of biofuels, thermal and catalytic chemical bond-breaking (cracking) technologies have been developed that enable converting bio-oils into bio-based alternatives to petroleum-derived diesel fuel and other fuels, such as jet fuel.

[1061] The use of medium chain fatty acid source, such produced by a cell of the invention, a plant or part thereof of the invention, a seed of of the invention, or a transgenic version of any one thereof, precludes the need for high-energy fatty acid chain cracking to achieve the shorter molecules needed for jet fuels and other fuels with low-temperature flow requirements. This method comprises cleaving one or more medium chain fatty acid groups from the glycerides to form glycerol and one or more free fatty acids. In addition, the method comprises separating the one or more medium chain fatty acids from the glycerol, and decarboxylating the one or more medium chain fatty acids to form one or more hydrocarbons for the production of the jet fuel.

### Compositions

[1062] The present invention also encompasses compositions, particularly pharmaceutical compositions, comprising one or more plants, plant parts, lipids, proteins, nitrogen containing molecules, or carbon containing molecules, produced using the methods of the invention.

[1063] A pharmaceutical composition may additionally comprise an active ingredient and a standard, well-known, non-toxic pharmaceutically-acceptable carrier, adjuvant or vehicle such as phosphate-buffered saline, water, ethanol, polyols, vegetable oils, a wetting agent, or an emulsion such as a water/oil emulsion. The composition may be in either a liquid or solid form. For example, the composition may be in the form of a tablet, capsule, ingestible liquid, powder, topical ointment or cream. Proper fluidity can be maintained for example, by the maintenance of the required particle size in the case of dispersions and by the use of surfactants. It may also be desirable to include isotonic agents for example, sugars, sodium chloride, and the like. Besides such inert diluents, the composition can also include adjuvants such as wetting agents, emulsifying and suspending agents, sweetening agents, flavoring agents and perfuming agents.

[1064] A typical dosage of a particular fatty acid is from 0.1 mg to 20 g, taken from one to five times per day (up to 100 g daily) and is preferably in the range of from about 10 mg to about 1, 2, 5, or 10 g daily (taken in one or multiple doses). As known in the art, a minimum of about 300 mg/day of fatty acid, especially polyunsaturated fatty acid, is desirable. However, it will be appreciated that any amount of fatty acid will be beneficial to the subject.

[1065] Possible routes of administration of the pharmaceutical compositions of the present invention include for example, enteral and parenteral. For example, a liquid preparation may be administered orally. Additionally, a homogenous mixture can be completely dispersed in water, admixed under sterile conditions with physiologically acceptable diluents, preservatives, buffers or propellants to form a spray or inhalant.

[1066] The dosage of the composition to be administered to the subject may be determined by one of ordinary skill in the art and depends upon various factors such as weight, age, overall health, past history, immune status, etc., of the subject.

[1067] Additionally, the compositions of the present invention may be utilized for cosmetic purposes. The compositions may be added to pre-existing cosmetic compositions, such that a mixture is formed, or a fatty acid produced according to the invention may be used as the sole “active” ingredient in a cosmetic composition.

### Polypeptides

[1068] The terms “polypeptide” and “protein” are generally used interchangeably herein.

[1069] A polypeptide or class of polypeptides may be defined by the extent of identity (% identity) of its amino acid sequence to a reference amino acid sequence, or by having a greater % identity to one reference amino acid sequence than to another. The % identity of a polypeptide to a reference amino acid sequence is typically determined by GAP analysis (Needleman and Wunsch, 1970; GCG program) with parameters of a gap creation penalty=5, and a gap extension penalty=0.3. The query sequence is at least 100 amino acids in length and the GAP analysis aligns the two sequences over a region of at least 100 amino acids. Even more preferably, the query sequence is at least 250 amino acids in length and the GAP analysis aligns the two sequences over a region of at least 250 amino acids. Even more preferably, the GAP analysis aligns two sequences over their entire length, and the extent of identity is determined over the full length of the reference sequence. The polypeptide or class of polypeptides may have the same enzymatic activity as, or a different activity than, or lack the activity of, the reference polypeptide. Preferably, the polypeptide has an enzymatic activity of at least 10% of the activity of the reference polypeptide.

[1070] As used herein a “biologically active fragment” is a portion of a polypeptide of the invention which maintains a defined activity of a full-length reference polypeptide for example, DGAT activity. Biologically active fragments as used herein exclude the full-length polypeptide. Biologically active fragments can be any size portion as long as they maintain the defined activity. Preferably, the biologically active fragment maintains at least 10% of the activity of the full length polypeptide.

[1071] With regard to a defined polypeptide or enzyme, it will be appreciated that % identity figures higher than those provided herein will encompass preferred embodiments. Thus, where applicable, in light of the minimum % identity figures, it is preferred that the polypeptide/enzyme comprises an amino acid sequence which is at least 60%, more preferably at least 65%, more preferably at least 70%, more preferably at least 75%, more preferably at least 80%, more preferably at least 85%, more preferably at least 90%, more preferably at least 91%, more preferably at least 92%, more preferably at least 93%, more preferably at least 94%, more preferably at least 95%, more preferably at least 96%, more preferably at least 97%, more preferably at least 98%, more preferably at least 99%, more preferably at least 99.1%, more preferably at least 99.2%, more preferably at least 99.3%, more preferably at least 99.4%, more preferably at least 99.5%, more preferably at least 99.6%, more preferably at least 99.7%, more preferably at least 99.8%, and even more preferably at least 99.9% identical to the relevant nominated SEQ ID NO.

[1072] Amino acid sequence mutants of the polypeptides defined herein can be prepared by introducing appropriate nucleotide changes into a nucleic acid defined herein, or by in vitro synthesis of the desired polypeptide. Such mutants include for example, deletions, insertions, or substitutions of residues within the amino acid sequence. A combination of deletions, insertions and substitutions can be made to arrive at the final construct, provided that the final polypeptide product possesses the desired characteristics.

[1073] Mutant (altered) polypeptides can be prepared using any technique known in the art, for example, using directed evolution or rational design strategies (see below). Products derived from mutated/altered DNA can readily be screened using techniques described herein to determine if they possess transcription factor, fatty acid acyltransferase or OBC activities.

[1074] In designing amino acid sequence mutants, the location of the mutation site and the nature of the mutation will depend on characteristic(s) to be modified. The sites for mutation can be modified individually or in series for example, by (1) substituting first with conservative amino acid choices and then with more radical selections depending upon the results achieved, (2) deleting the target residue, or (3) inserting other residues adjacent to the located site.

[1075] Amino acid sequence deletions generally range from about 1 to 15 residues, more preferably about 1 to 10 residues and typically about 1 to 5 contiguous residues.

[1076] Substitution mutants have at least one amino acid residue in the polypeptide removed and a different residue inserted in its place. The sites of greatest interest for substitutional mutagenesis to inactivate enzymes include sites identified as the active site(s). Other sites of interest are those in which particular residues obtained from various strains or species are identical. These positions may be important for biological activity. These sites, especially those falling within a sequence of at least three other identically conserved sites, are preferably substituted in a relatively conservative manner. Such conservative substitutions are shown in Table 1 under the heading of “exemplary substitutions”.

TABLE 1
Exemplary substitutions.

| Original | Exemplary |
|---|---|
| Residue | Substitutions |
| Ala (A) | val; leu; ile; gly |
| Arg (R) | lys |
| Asn (N) | gln; his |
| Asp (D) | glu |
| Cys (C) | ser |
| Gln (Q) | asn; his |
| Glu (E) | asp |
| Gly (G) | pro, ala |
| His (H) | asn; gln |
| Ile (I) | leu; val; ala |
| Leu (L) | ile; val; met; ala; phe |
| Lys (K) | arg |
| Met (M) | leu; phe |
| Phe (F) | leu; val; ala |
| Pro (P) | gly |
| Ser (S) | thr |
| Thr (T) | ser |
| Trp (W) | tyr |
| Tyr (Y) | trp; phe |
| Val (V) | ile; leu; met; phe, ala |

[1077] In a preferred embodiment a mutant/variant polypeptide has only, or not more than, one or two or three or four conservative amino acid changes when compared to a naturally occurring polypeptide. Details of conservative amino acid changes are provided in Table 1. As the skilled person would be aware, such minor changes can reasonably be predicted not to alter the activity of the polypeptide when expressed in a transgenic plant or part thereof. Mutants with desired activity may be engineered using standard procedures in the art such as by performing random mutagenesis, targeted mutagenesis, or saturation mutagenesis on known genes of interest, or by subjecting different genes to DNA shuffling.

### Examples

### Example 1. General Materials and Methods

### Expression of Genes in Plant Cells in a Transient Expression System

[1078] Genes were expressed in plant cells using a transient expression system essentially as described by Voinnet et al. (2003) and Wood et al. (2009). Binary vectors containing the coding region to be expressed by a strong constitutive e35S promoter containing a duplicated enhancer region were introduced into Agrobacterium tumefaciens strain AGL1. A chimeric binary vector, 35S:p19, for expression of the p19 viral silencing suppressor was separately introduced into AGL1, as described in WO2010/057246. A chimeric binary vector, 35S:V2, for expression of the V2 viral silencing suppressor was separately introduced into AGL1. The recombinant cells were grown to stationary phase at 28° C. in LB broth supplemented with 50 mg/L kanamycin and 50 mg/L rifampicin. The bacteria were then pelleted by centrifugation at 5000 g for 5 min at room temperature before being resuspended to OD600=1.0 in an infiltration buffer containing 10 mM MES pH 5.7, 10 mM MgCl₂ and 100 uM acetosyringone. The cells were then incubated at 28° C. with shaking for 3 hours after which the OD600 was measured and a volume of each culture, including the viral suppressor construct 35S:p19 or 35S:V2, required to reach a final concentration of OD600=0.125 added to a fresh tube. The final volume was made up with the above buffer. Leaves were then infiltrated with the culture mixture and the plants were typically grown for a further three to five days after infiltration before leaf discs were recovered for either purified cell lysate preparation or total lipid isolation.

Transformation of Sorghum bicolor L.

### Plant Material

[1079] Sorghum plants of the inbred cultivar TX-430 (Miller, 1984) were grown in a plant growth chamber (Conviron, PGC-20 flex) at 28±1° C. “day” temperature and 20±1° C. “night” temperature, with a 16 hr photoperiod at a light intensity during the “day” of 900-1000 LUX. Panicles were covered with white translucent paper bags before flowering. Immature embryos were harvested from panicles 12-15 days after anthesis. Panicles were washed several times with water and developing seeds that were uniform in size were isolated and surface-sterilized using 20% commercial bleach mixed with 0.1% Tween-20 for 15-20 min. They were then washed with sterile distilled water 3 times each for 20 min, and blotted dry in a laminar flow hood. Immature embryos (IEs) ranging from 1.4 to 2.5 mm in length were aseptically isolated in the laminar flow hood and used as the starting tissue for preparation of green regenerative tissue.

### Base Cultivation Media

[1080] Media used for plant transformation were based on MS (Murashige and Skoog, 1962), supplied by PhytoTechnology Laboratories (M519). The pH of the media was adjusted to 5.8 before sterilization at 121° C. for 15 min. Heat sensitive plant growth regulators and other additives such as Geneticin (G418, Sigma) used as a selection agent, were filter sterilized (0.2 μm) and added to the media after sterilization when the media had cooled to about 55° C. The optimized culture medium composition for the different stages of plant transformation from callus induction to plant regeneration from green tissue induced from immature embryos is presented in Table 2.

### Cultivation Methods and Materials

[1081] The isolated IEs ranging from 1.4 to 2.5 mm in length were placed onto callus induction media-osmotic medium (CIM-osmotic medium, Table 2) with their scutellum facing upward. The CIM base medium was modified to improve callus quality and induction frequency from immature embryos, as well as callus regeneration media, by including α-Lipoic acid (1 to 5 mg/l), Melatonin (5 to 10 mg/l) and 2-Aminoidan-2-phosphonic acid HCl (1 to 2 mg/l) unless otherwise stated. For the development of green tissue, immature embryos were incubated under fluorescent light of approximately 45-50 μmol s⁻¹ m⁻² (16 h/day) in a tissue culture room at 24±2° C. After three days of culture, the root and shoot poles of the immature embryos were aseptically separated and re-inoculated on to the same CIM and maintained under the same conditions as described above. They were subcultured every two weeks onto the same CIM for 6 weeks and evaluated for callus quality, callus induction efficiency and transformation efficiency.

TABLE 2
Media used in DEC tissue induction and transformation of sorghum

| Name of the medium | Composition | Culture duration | |
|---|---|---|---|
| CIM- | MS medium powder with vitamins, 4.33 g/l; 2,4-D, 1 | 3-4 hrs before | |
| Osmotic | mg/l; BAP, 0.5 mg/l; L-proline, 0.7 g/l; L-Lipoic | bombardment; | |
| Medium | acid, 1 mg/l; peptone, 0.82 g/l; Myo-inositol, 150 | o/n post | |
| | mg/l; Copper sulfate, 0.8 mg/l; Manitol, 36.4 g/l; | bombardment | |
| | Sorbitol, 36.4 g/l; Agar, 8.5 g/l, pH 5.8 | | |
| CIM- pre | MS medium powder with vitamins, 4.33 g/l; 2,4-D, 1 | 3-4 | days |
| selection | mg/l; BAP, 0.5 mg/l; L-proline, 0.7 g/l; L-Lipoic | | |
| medium | acid, 1 mg/l; peptone, 0.82 g/l; Myo-inosito, l 150 | | |
| | mg/l; Copper sulfate, 0.8 mg/l; Maltose, 30 g/l; L- | | |
| | cysteine, 50 mg/l; Ascorbic acid, 15 mg/l; Agar, 9 | | |
| | g/l, pH 5.8 | | |
| CIM-callus | MS medium powder with vitamins, 4.33 g/l; 2,4-D, 1 | 4 | weeks |
| induction | mg/l; BAP, 0.5 mg/l; L-proline, 0.7 g/l; L-Lipoic | | |
| medium/G25 | acid, 1 mg/l; peptone, 0.82 g/l; Myo-inositol, 150 | | |
| | mg/l; Copper sulfate, 0.8 mg/l; Maltose, 30 g/l; | | |
| | Geneticin, 25 mg/l; Agar, 9 g/l, pH 5.8 | | |
| SIM-shoot | MS medium powder with vitamins, 4.33 g/l; BAP, | 2 | weeks |
| induction | 1.0 mg/l; 2,4-D, 0.5 mg/l; L-proline, 0.7 g/l; L-Lipoic | | |
| medium/G25 | acid, 1 mg/l; peptone, 0.82 g/l; Myo-inositol, 150 | | |
| | mg/l; Copper sulfate, 0.8 mg/l; Maltose, 30 g/l; | | |
| | Geneticin, 25 mg/l; Agar, 9 g/l, pH 5.8 | | |
| SRM- shoot | MS medium powder with vitamins, 4.33 g/l; BAP,. | 2 | weeks |
| regeneration | 1.0 mg/l; TDZ, 0.5 mg/l; L-proline, 0.7 g/l; L-Lipoic | | |
| medium/G25 | acid, 1 mg/l; peptone, 0.82 g/l; Myo-inositol, 150 | | |
| | mg/l; Copper sulfate, 0.8 mg/l; Maltose, 30 g/l; | | |
| | Geneticin, 25 mg/l; Agar, 9 g/l, pH 5.8 | | |
| SOG-shoot | MS medium powder with vitamins, 2.2 g/l; L- | 2 | weeks |
| out growth | proline, 0.7 g/l; L-Lipoic acid, 1 mg/l; peptone, 0.82 | | |
| medium/G30 | g/l; Myo-inositol, 150 mg/l; Copper sulfate, 0.8 mg/l; | | |
| | Sucrose, 15 g/l; Geneticin, 30 mg/l; Agar, 9 g/l, pH 5.8 | | |
| RIM-root | MS medium powder with vitamins, 4.33 g/l; L- | 4 | weeks |
| induction | proline, 0.7 g/l; L-Lipoic acid, 1 mg/l; peptone, 0.82 | | |
| medium/G15 | g/l; Myo-inositol, 150 mg/l; Copper sulfate, 0.8 mg/l; | | |
| | sucrose, 15 g/l; IAA, 1 mg/l; IBA, 1 mg/l; NAA, 1 | | |
| | mg/l; PVP, 2 g/l; Geneticin, 15 mg/l; Agar 9 g/l, pH 5.8 | | |

[1082] Callus initiated from IEs in the first 3-4 weeks on CIM were mostly embryogenic and slowly differentiated into embryogenic callus with nodular structures which were coloured from pale to darker green. Embryogenic calli with green nodular structures were selected and maintained on the same medium (CIM) by subculturing every 2 weeks for up to 6 months or more, for use as explants for transformation. This type of tissue is termed herein as “differentiating embryogenic callus” tissue or “DEC” tissue, since this tissue forms nodular structures of differentiating cells which maintain embryogenic and organogenic potential, even though the tissues were really a mixture of callus cells, cells forming nodular structures and granular structures, and intermediate cells which the inventors understood were on the developmental pathway somewhere between callus (which is undifferentiated cells) and the nodular structures. Sometimes, the tissues included early stage (globular) somatic embryos.

### Particle-Bombardment of Green Regenerative DEC Tissues

[1083] Plasmids containing a selectable marker gene encoding the neomycin phosphotransferase II (NptII) providing resistance to the antibiotic Geneticin, under the control of the pUbi promoter and terminated by the nos 3′ region, were made or obtained for experiments to achieve stable transformation or for co-bombardment with other plasmids. Plasmid DNAs were isolated using a Zymopure™ Maxiprep kit (USA) according to the manufacturer's instructions. As a control vector for transformation, a genetic vector was obtained which contained uidA (GUS) and bar genes designed for expression in plant cells. The uidA gene was under the regulatory control of a maize polyubiquitin promoter (pUbi) and an Agrobacterium tumefaciens octopine synthase polyadenylation/terminator (ocs 3′) sequence. The sequence between the promoter and the protein coding region included the 5′ UTR and first intron of the Ubi gene. The uidA reporter gene also contained, within its protein coding region, an intron from a castor bean catalase gene which prevented translation of functional GUS protein in Agrobacterium, thereby reducing the background GUS gene expression in inoculated plant tissues. Therefore, any GUS expression would be due to expression of the uidA gene in the plant cells. The bar gene was also under the regulatory control of a pUbi promoter and terminated with an Agrobacterium nopaline synthase 3′ regulatory sequence (nos 3′). The uidA/bar vector was initially used in experiments to detect transient gene expression in the sorghum DEC tissues.

[1084] Uniform healthy, green regenerative DEC tissues (4-5 mm in size), produced using methods described above and having been cultured for 6 weeks to 6 months from initiation, were used for microprojectile-mediated transformation (bombardment) with the plasmids. Approximately 15 uniform green DEC tissues (each 4-5 mm) were placed at the centre of a petri dish (90 mm diameter) containing CIM-osmotic medium (Table 2) and incubated in the dark for about 4 hrs prior to bombardment. Bombardment was performed with a PDS-1000 He device (Biorad, Hercules, Calif.) as described by Liu et al. (2014). Post bombardment, the tissues were kept on the same osmotic medium overnight and transferred to pre-selection medium the next morning

[1085] Green DEC tissues bombarded with the genetic vector plasmid having a selectable marker encoding NptII were transferred to CIM-PS medium for 3-4 days before any selection, with addition to the medium of two compounds as antioxidants, L-cysteine (50 mg/l) and ascorbic acid (15 mg/l) (Table 2). Without the addition of these antioxidants in pre-selection medium, many of the bombarded tissues turned brown, some quite dark brown in colour, and many lost any ability to grow further. After 3-4 days on pre-selection medium, some of the bombarded tissues were subjected to GUS staining and viewed under a microscope to count the distinctive blue (GUS positive) spots, to check that genes had been transferred and could be expressed. The inclusion of the two antioxidants in the pre-selection medium improved the efficiency of the transformation as shown by the transient expression of the GUS gene.

Selection and Regeneration of Trans Genic Plants with Optimised Conditions

[1086] Following bombardment and 3-4 days culture on pre-selection medium without selective agent (Geneticin), the bombarded tissues had increased in size from 4-5 mm to about 6-7 mm. These tissues were transferred to selective medium CIM/G25 containing 25 mg/l Geneticin (Table 2) and cultured for a further 4 weeks. When possible, the bombarded tissues were split into 2-6 pieces each, increasing the recovery of independent transformants. All of the tissues were cultured on the media as described in Table 2 and maintained in order to regenerate putative transgenic plants.

[1087] Plants were regenerated efficiently upon growth on these media. Each bombarded tissue and the shoots obtained from it were subcultured and maintained separately for calculation of the transformation efficiency. Positive transformation was confirmed by PCR on plant genomic DNA isolated from shoot samples, showing the presence of the selectable marker gene. The number of transformants was calculated per input DEC tissue. Transformation efficiencies of about 50% were obtained, expressed as independent transformants per input bombarded tissue.

### Agrobacterium-Mediated Transformation of Green Regenerative DEC Tissues

[1088] Uniform healthy, green regenerative DEC tissues (4-5 mm in size) produced using methods described in the foregoing examples and which have been cultured for 6 weeks to 6 months from initiation, are used for Agrobacterium-mediated transformation.

[1089] Genetic vectors having T-DNA regions containing the genes for transformation were designed and made for transformation of green regenerative DEC tissues using Agrobacterium-mediated transformation. A control binary vector contained uidA (GUS) and bar genes designed for expression in plant cells. The uidA gene was under the regulatory control of a maize polyubiquitin promoter (pUbi) and an Agrobacterium tumefaciens octopine synthase polyadenylation/terminator (ocs 3′) sequence. The sequence between the promoter and the protein coding region included the 5′ UTR and first intron of the Ubi gene. The uidA reporter gene also contained, within its protein coding region, an intron from a castor bean catalase gene which prevented translation of functional GUS protein in Agrobacterium, thereby reducing the background GUS gene expression in inoculated plant tissues. Therefore, any GUS expression was due to expression of the uidA gene in the plant cells. The bar gene was also under the regulatory control of a pUbi promoter and terminated with an Agrobacterium nopaline synthase 3′ regulatory sequence (nos 3′).

[1090] A suitable Agrobacterium tumefaciens strain was obtained e.g., AGL1 as described in Lazo et al. (1991) and the genetic vector is introduced into the Agrobacterium tumefaciens strain by heat shock method.

[1091] Agrobacterium cultures harboring the genetic construct are grown in suitable medium e.g., LB medium, and under appropriate conditions to produce an Agrobacterium inoculum, after which time the uniform healthy, green regenerative DEC tissues are infected with Agrobacterium inoculum. The infected DEC tissues are blotted on sterile filter paper to remove excess Agrobacterium and transferred to co-cultivation medium, optionally supplemented with antioxidants, and incubated in the dark at approximately 22-24° C. for 2-4 days. Following incubation, the DEC tissues are treated with an appropriate agent to kill the Agrobacterium, washed in sterile water, transferred to an appropriate medium and allowed to grow. After 4-6 weeks, shoots are excised and cultured on shoot elongation medium, after which time putative transgenic shoots are then detected using appropriate assays.

Brassica napus Transformation

[1092] Brassica napus seeds were sterilized using chlorine gas as described by Kereszt et al. (2007) and germinated on tissue culture medium. Cotyledonary petioles with 2-4 mm stalk were isolated as described by Belide et al. (2013) and used as explants. A. tumefaciens AGL1 (Lazo et al., 1991) cultures containing the binary vector were prepared and cotyledonary petioles inoculated with the cultures as described by Belide et al. (2013). Infected cotyledonary petioles were cultured on MS medium supplemented with 1 mg/L TDZ+0.1 mg/L NAA+3 mg/L AgNO₃+250 mg/L cefotaxime, 50 mg/L timentin and 25 mg/L kanamycin and cultured for 4 weeks at 24° C. with 16 hr/8 hr light-dark photoperiod with a biweekly subculture on to the same medium. Explants with green callus were transferred to shoot initiation medium (MS+1 mg/L kinetin+3 mg/L AgNO₃+250 mg/L cefotaxime+50 mg/L timentin+25 mg/L kanamycin) and cultured for another 2-3 weeks. Small shoots (˜1 cm) were isolated from the resistant callus and transferred to shoot elongation medium (MS medium with 0.1 mg/L gibberelic acid+3 mg/L AgNO₃+250 mg/L cefotaxime+25 mg/L kanamycin) and cultured for another two weeks. Healthy shoots with one or two leaves were selected and transferred to rooting media (1/2 MS with 1 mg/L NAA+20 mg/L ADS+3 mg/L AgNO₃+250 mg/L cefotaxime) and cultured for 2-3 weeks. DNA was isolated from small leaves of resistant shoots using the plant DNA isolation kit (Bioline, Alexandria, NSW, Australia) as described by the manufacturer's protocol. The presence of T-DNA sequences was tested by PCR amplification on genomic DNA. Positive, transgenic shoots with roots were transferred to pots containing seedling raising mix and grown in a glasshouse at 24° C. daytime/16° C. night-time (standard conditions).

### Purified Leaf Lysate—Enzyme Assays

[1093] Nicotiana benthamiana leaf tissues previously infiltrated as described above were ground in a solution containing 0.1 M potassium phosphate buffer (pH 7.2) and 0.33 M sucrose using a glass homogenizer. Leaf homogenate was centrifuged at 20,000 g for 45 minutes at 4° C. after which each supernatant was collected. Protein content in each supernatant was measured according to Bradford (1976) using a Wallac1420 multi-label counter and a Bio-Rad Protein Assay dye reagent (Bio-Rad Laboratories, Hercules, Calif. USA). Acyltransferase assays used 100 μg protein according to Cao et al. (2007) with some modifications. The reaction medium contained 100 mM Tris-HCl (pH 7.0), 5 mM MgCl₂, 1 mg/mL BSA (fatty acid-free), 200 mM sucrose, 40 mM cold oleoyl-CoA, 16.4 μM sn-2 monooleoylglycerol[¹⁴C] (55 mCi/mmol, American Radiochemicals, Saint Louis, Mo. USA) or 6.0 μM [¹⁴C]glycerol-3-phosphate (G-3-P) disodium salt (150 mCi/mmol, American Radiochemicals). The assays were carried out for 7.5, 15, or 30 minutes.

### Lipid Analysis

### Analysis of Oil Content in Seeds

[1094] When seed oil content or total fatty acid composition was to be determined in small seeds such as Arabidopsis seeds, fatty acids in the seeds were directly methylated without crushing of seeds. Seeds were dried in a desiccator for 24 hours and approximately 4 mg of seed was transferred to a 2 ml glass vial containing a Teflon-lined screw cap. 0.05 mg triheptadecanoin (TAG with three C17:0 fatty acids) dissolved in 0.1 ml toluene was added to the vial as internal standard. Seed fatty acids were methylated by adding 0.7 ml of 1N methanolic HCl (Supelco) to the vial containing seed material. Crushing of the seeds was not necessary for complete methylation with small seeds such as Arabidopsis seeds. The mixture was vortexed briefly and incubated at 80° C. for 2 hours. After cooling the mixtures to room temperature, 0.3 ml of 0.9% NaCl (w/v) and 0.1 ml hexane was added to the vial and mixed well for 10 minutes in a Heidolph Vibramax 110. The FAME were collected into a 0.3 ml glass insert and analysed by GC with a flame ionization detector (FID) as described below.

[1095] The peak area of individual FAME were first corrected on the basis of the peak area responses of a known amount of the same FAMEs present in a commercial standard GLC-411 (NU-CHEK PREP, INC., USA). GLC-411 contains equal amounts of 31 fatty acids (% by weight), ranging from C8:0 to C22:6. In case of fatty acids which were not present in the standard, the peak area responses of the most similar FAME was taken. For example, the peak area response of FAMEs of 16:1d9 was used for 16:1d7 and the FAME response of C22:6 was used for C22:5. The corrected areas were used to calculate the mass of each FAME in the sample by comparison to the internal standard mass. Oil is stored mainly in the form of TAG and its weight was calculated based on FAME weight. Total moles of glycerol was determined by calculating moles of each FAME and dividing total moles of FAMEs by three. TAG content was calculated as the sum of glycerol and fatty acyl moieties using a relation: % oil by weight=100×((41×total mol FAME/3)+(total g FAME−(15×total mol FAME)))/g seed, where 41 and 15 are molecular weights of glycerol moiety and methyl group, respectively.

### Analysis of Fatty Acid Content in Larger Seeds

[1096] To determine fatty acid composition in single seeds that were larger, such as canola and Camelina seeds, or Sorghum or corn seeds, direct methylation of fatty acids in the seed was performed as for Arabidopsis seeds except with breaking of the seed coats. This method extracted sufficient oil from the seed to allow fatty acid composition analysis. To determine the fatty acid composition of total extracted lipid from seeds, seeds were crushed and lipids extracted with CHCl₃/MeOH. Aliquots of the extracted lipid were methylated and analysed by GC. Pooled seed-total lipid content (seed oil content) of canola was determined by two extractions of lipid using CHCl₃/MeOH from a known weight of desiccated seeds after crushing, followed by methylation of aliquots of the lipids together with the 17:0 fatty acids as internal standard. In the case of larger seeds such as Camelina, the lipid from a known amount of seeds was methylated together with known amount of 17:0 fatty acids as for the Arabidopsis oil analysis and FAME were analysed by GC. For TAG quantitation, TAG was fractionated from the extracted lipid using TLC and directly methylated in silica using 17:0 TAG as an internal standard. These methods are described more fully as follows.

[1097] After harvest at plant maturity, seeds were desiccated by storing the seeds for 24 hours at room temperature in a desiccator containing silica gel as desiccant. Moisture content of the seeds was typically 6-8%. Total lipids were extracted from known weights of the desiccated seeds by crushing the seeds using a mixture of chloroform and methanol (2/1 v/v) in an eppendorf tube using a Reicht tissue lyser (22 frequency/seconds for 3 minutes) and a metal ball. One volume of 0.1M KCl was added and the mixture shaken for 10 minutes. The lower non-polar phase was collected after centrifuging the mixture for 5 minutes at 3000 rpm. The remaining upper (aqueous) phase was washed with 2 volumes of chloroform by mixing for 10 minutes. The second non-polar phase was also collected and pooled with the first. The solvent was evaporated from the lipids in the extract under nitrogen flow and the total dried lipid was dissolved in a known volume of chloroform.

[1098] To measure the amount of lipid in the extracted material, a known amount of 17:0-TAG was added as internal standard and the lipids from the known amount of seeds incubated in 1 N methanolic-HCl (Supelco) for 2 hours at 80° C. FAME thus made were extracted in hexane and analysed by GC. Individual FAME were quantified on the basis of the amount of 17:0 TAG-FAME. Individual FAME weights, after subtraction of weights of the esterified methyl groups from FAME, were converted into moles by dividing by molecular weights of individual FAME. Total moles of all FAME were divided by three to calculate moles of TAG and therefore glycerol. Then, moles of TAG were converted in to weight of TAG. Finally, the percentage oil content on a seed weight basis was calculated using seed weights, assuming that all of the extracted lipid was TAG or equivalent to TAG for the purpose of calculating oil content. This method was based on Li et al. (2006). Seeds other than Camelina or canola seeds that are of a similar size can also be analysed by this method.

[1099] Canola and other seed oil content can be measured by nuclear magnetic resonance techniques (Rossell and Pritchard, 1991) by a pulsed wave NMS 100 Minispec (Bruker Pty Ltd Scientific Instruments, Germany). The NMR method can simultaneously measured moisture content. Seed oil content can also be measured by near infrared reflectance (NIR) spectroscopy such as using a NIRSystems Model 5000 monochromator. Moisture content can also be measured on a sample from a batch of seeds by drying the seeds in the sample for 18 hours at about 100° C., according to Li et al. (2006).

Analysis of Lipids from Leaf Lysate Assays

[1100] Lipids from the lysate assays were extracted using chloroform:methanol:0.1 M KCl (2:1:1) and recovered. The different lipid classes in the samples were separated on Silica gel 60 thin layer chromatography (TLC) plates (MERCK, Dermstadt, Germany) impregnated with 10% boric acid. The solvent system used to fractionate TAG from the lipid extract was chloroform/acetone (90/10 v/v). Individual lipid classes were visualized by exposing the plates to iodine vapour and identified by running parallel authentic standards on the same TLC plate. The plates were exposed to phosphor imaging screens overnight and analysed by a Fujifilm FLA-5000 phosphorimager before liquid scintillation counting for DPM quantification.

Total Lipid Isolation and Fractionation of Lipids from Vegetative Tissues

[1101] Fatty acid composition of total lipid in leaf and other vegetative tissue samples was determined by direct methylation of the fatty acids in freeze-dried samples. For total lipid quantitation, fatty acids in a known weight of freeze-dried samples, with 17:0 FFA, were directly methylated. To determine total TAG levels in leaf samples, TAG was fractionated by TLC from extracted total lipids, and methylated in the presence of 17:0 TAG internal standard, because of the presence of substantial amounts of polar lipids in leaves. This was done as follows. Tissues including leaf samples were freeze-dried, weighed (dry weight) and total lipids extracted as described by Bligh and Dyer (1959) or by using chloroform:methanol:0.1 M KCl (CMK; 2:1:1) as a solvent. Total lipids were extracted from N. benthamiana leaf samples, after freeze dying, by adding 900 μL of a chloroform/methanol (2/1 v/v) mixture per 1 cm diameter leaf sample. 0.8 μg DAGE was added per 0.5 mg dry leaf weight as internal standard when TLC-FID analysis was to be performed. Samples were homogenized using an IKA ultra-turrax tissue lyser after which 500 μL 0.1 M KCl was added. Samples were vortexed, centrifuged for 5 min and the lower phase was collected. The remaining upper phase was extracted a second time by adding 600 μL chloroform, vortexing and centrifuging for 5 min. The lower phase was recovered and pooled into the previous collection. Lipids were dried under a nitrogen flow and resuspended in 2 μL chloroform per mg leaf dry weight. Total lipids of N. tabacum leaves or leaf samples were extracted as above with some modifications. If 4 or 6 leaf discs (each approx 1 cm² surface area) were combined, 1.6 ml of CMK solvent was used, whereas if 3 or less leaf discs were combined, 1.2 ml CMK was used. Freeze dried leaf tissues were homogenized in an eppendorf tube containing a metallic ball using a Reicht tissue lyser (Qiagen) for 3 minutes at 20 frequency/sec.

### Separation of Neutral Lipids Via TLC and Transmethylation

[1102] Known volumes of total leaf extracts such as, for example, 30 μL were loaded on a TLC silica gel 60 plate (1×20 cm) (Merck KGaA, Germany). The neutral lipids were fractionated into the different types and separated from polar lipids via TLC in an equilibrated development tank containing a hexane/DEE/acetic acid (70/30/1 v/v/v/) solvent system. The TAG bands were visualised by primuline spraying, marked under UV, scraped from the TLC plate, transferred to 2 mL GC vials and dried with N₂. 750 μL of 1N methanolic-HCl (Supelco analytical, USA) was added to each vial together with a known amount of C17:0 TAG as an internal standard, depending on the amount of TAG in each sample. Typically, 30 μg of the internal standard was added for low TAG samples whilst up to 200 μg of internal standard was used in the case of high TAG samples.

[1103] Lipid samples for fatty acid composition analysis by GC were transmethylated by incubating the mixtures at 80° C. for 2 hours in the presence of the methanolic-HCl. After cooling samples to room temperature, the reaction was stopped by adding 350 μl H₂O. Fatty acyl methyl esters (FAME) were extracted from the mixture by adding 350 hexane, vortexing and centrifugation at 1700 rpm for 5 min. The upper hexane phase was collected and transferred into GC vials with 300 μl conical inserts. After evaporation, the samples were resuspended in 30 μl hexane. One μl was injected into the GC.

[1104] The amount of individual and total fatty acids (TFA) present in the lipid fractions was quantified by GC by determining the area under each peak and calculated by comparison with the peak area for the known amount of internal standard. TAG content in leaf was calculated as the sum of glycerol and fatty acyl moieties in the TAG fraction using a relation: % TAG by weigh=100×((41×total mol FAME/3)+(total g FAME−(15×total mol FAME)))/g leaf dry weight, where 41 and 15 are molecular weights of glycerol moiety and methyl group, respectively.

### Capillary Gas-Liquid Chromatography (GC)

[1105] FAME were analysed by GC using an Agilent Technologies 7890A GC (Palo Alto, Calif., USA) equipped with an SGE BPX70 (70% cyanopropyl polysilphenylene-siloxane) column (30 m×0.25 mm i.d., 0.25 μm film thickness), an FID, a split/splitless injector and an Agilent Technologies 7693 Series auto sampler and injector. Helium was used as the carrier gas. Samples were injected in split mode (50:1 ratio) at an oven temperature of 150° C. After injection, the oven temperature was held at 150° C. for 1 min, then raised to 210° C. at 3° C.·min⁻¹ and finally to 240° C. at 50° C.·min⁻¹. Peaks were quantified with Agilent Technologies Chem Station software (Rev B.04.03 (16), Palo Alto, Calif., USA) based on the response of the known amount of the external standard GLC-411 (Nucheck) and C17:0-Me internal standard.

### Quantification of TAG via Iatroscan

[1106] One μL of lipid extract was loaded on one Chromarod-SII for TLC-FID Iatroscan™ (Mitsubishi Chemical Medience Corporation—Japan). The Chromarod rack was then transferred into an equilibrated developing tank containing 70 mL of a hexane/CHCl₃/2-propanol/formic acid (85/10.716/0.567/0.0567 v/v/v/v) solvent system. After 30 min of incubation, the Chromarod rack was dried for 3 min at 100° C. and immediately scanned on an Iatroscan MK-6s TLC-FID analyser (Mitsubishi Chemical Medience Corporation—Japan). Peak areas of DAGE internal standard and TAG were integrated using SIC-48011 integration software (Version:7.0-E SIC System instruments Co., LTD—Japan).

[1107] TAG quantification was carried out in two steps. First, DAGE was scanned in all samples to correct the extraction yields after which concentrated TAG samples were selected and diluted. Next, TAG was quantified in diluted samples with a second scan according to the external calibration using glyceryl trilinoleate as external standard (Sigma-Aldrich).

### Quantification of TAG in Leaf Samples by GC

[1108] The peak area of individual FAME were first corrected on the basis of the peak area responses of known amounts of the same FAMEs present in a commercial standard GLC-411 (NU-CHEK PREP, Inc., USA). The corrected areas were used to calculate the mass of each FAME in the sample by comparison to the internal standard. Since oil is stored primarily in the form of TAG, the amount of oil was calculated based on the amount of FAME in each sample. Total moles of glycerol were determined by calculating the number of moles of FAMEs and dividing total moles of FAMEs by three. The amount of TAG was calculated as the sum of glycerol and fatty acyl moieties using the formula: % oil by weight=100×((41×total mol FAME/3)+(total g FAME-(15×total mol FAME)))/g leaf dry weight, where 41 and 15 were the molecular weights of glycerol moiety and methyl group, respectively.

### Soluble Protein Extraction and Quantitation

[1109] Soluble protein was extracted from 10-20 mg ground fresh plant tissue. Briefly, chlorophyll and soluble sugars were extracted at 80° C. in 50-80% (v/v) ethanol in 2.5 mM HEPES buffer at pH 7.5 and the pellet was retained for soluble protein determination. The pellet was washed in distilled water, resuspended in 400 μl 0.1 M NaOH and heated at 95° C. for 30 min. The soluble protein in the supernatant was determined using a Bradford assay (Bradford, 1976). Soluble protein was also extracted from freshly ground tissue in buffer containing 100 mM Tris-HCl pH 8.0 and 10 mM MgCl₂. Quantitation of the soluble protein by Bradford assay gave results similar to those obtained using the extraction with NaOH.

### SDS-Polyacrylamide Gel Electrophoresis (SDS-PAGE)

[1110] Total protein was extracted from frozen, ground leaf tissue by heating the samples in Laemmli buffer (1:3 w/v) at 95° C. for 10 min. Aliquots of the supernatant, normalised to fresh weight (FW), were separated on a 10% acrylamide gel according to Laemmli (1970).

### Leaf Nitrogen Content

[1111] Total nitrogen content (% dry weight, DW) of 2-2.2 mg freeze-dried leaf tissue was determined using a Europa 20-20 isotope ratio mass spectrometer with an ANCA preparation system, comprising a combustion and reduction tube operating at 1000° C. and 600° C., respectively.

### Carbon and Energy Contents

[1112] Carbon and energy contents were calculated based on the amount of TAG, starch and total carbohydrates in wildtype and transgenic leaf tissues (% leaf dry weight). Starch levels (% leaf dry weight) were first converted to glucose equivalents by multiplying by a factor of 180/162 to take into account the loss of water due to chain linkages. Soluble sugars were defined as the difference between the total carbohydrate and starch levels. The carbon and energy contents of TAG and soluble sugars were calculated based on the energy density, molecular weight and carbon contents of triolein (35114 kJ/mol; 885.4 g/mol; 57 mol C/mol) and glucose (28.3 kJ/mol; 180 g/mol; 6 mol C/mol), respectively. The carbon and energy contents of the starch-glucose equivalents were calculated as described above for the soluble sugar fraction. In summary, the formulas used to obtain carbon content and energy density of the different carbon metabolic pools are as follows:

Carbon content of TAG (mmol C/g leaf dry weight)=(% TAG×57 mol C/mol TAG×1000)/(100×885.4 g/mol TAG)

Carbon content of soluble sugars (mmol C/g leaf dry weight)=[(% total carbohydrates−(% starch×180/162))×6 mol C/mol glucose*1000]/(100*180 g/mol glucose)

Carbon content of starch (mmol C/g leaf dry weight)=[(% starch×180/162))×6 mol C/mol glucose*1000]/(100*180 g/mol glucose)

Energy content of TAG (kJ/g leaf dry weight)=(% TAG×39.66 kJ/g TAG)/100

Energy content of soluble sugars (kJ/g leaf dry weight)=[(% total carbohydrates−(% starch×180/162))×15.57 kJ/mol glucose]/100

Energy content of starch (kJ/g leaf dry weight)=[(% starch×180/162))×15.57 kJ/mol glucose]/100.

### Example 2. Silencing of a TAG Lipase in Plants Accumulating High Levels of TAG in Leaf Tissue

[1113] The Sugar Dependent 1 (SDP1) TAG lipase has been demonstrated to play a role in TAG turnover in non-seed tissues of A. thaliana as well as during seed germination (Eastmond et al., 2006; Kelly et al., 2011; Kelly et al., 2013). SDP1 is expressed in developing seed and the SDP1 polypeptide is also present in mature seed in association with oil bodies. Silencing of the gene encoding SDP1 resulted in a small but significant increase in TAG levels in A. thaliana roots and stems (<0.4% on dry weight basis) while an even smaller increase was observed in leaf tissue (Kelly et al., 2013).

[1114] To determine whether TAG levels could be increased further in leaf and stem tissues relative to co-expression of AtWRI1 and AtDGAT1, an experiment was designed to silence an endogenous SDP1 gene in N. tabacum plants which were homozygous for a T-DNA having genes for transgenic expression of the WRI, DGAT1 and Oleosin polypeptides (Vanhercke et al., 2014). A BLAST search of the N. benthamiana transcriptome (Naim et al., 2012) using the AtSDP1 nucleotide sequence as query identified a transcript (Nbv5tr6385200, SEQ ID NO:173) with homology to the A. thaliana SDP1 gene. A 713 bp region (SEQ ID NO:174) was selected for hairpin mediated gene silencing. A 3.903 kb synthetic fragment was designed, based on the pHELLSGATE12 vector, which comprised, in order, the enTCUP2 constitutive promoter, the 713 bp N. benthamiana SDP1 fragment in sense orientation flanked by attB1 and attB2 sites, a Pdk intron, a cat intron sequence in reverse orientation, a second 713 bp N. benthamiana SDP1 fragment flanked by attB1 and attB2 sites in reverse (antisense) orientation, and the OCS 3′ region terminator/polyadenylation site (FIG. 2). The insert was subcloned into pJP3303 using SmaI and KasI restriction sites and the resulting expression vector was designated pOIL051. This chimeric DNA contains a hygromycin resistance selectable marker gene.

[1115] pOIL051 was used to produce transformed N. tabacum plants by Agrobacterium-mediated transformation. The starting plant cells were from transgenic plants which were homozygous for the T-DNA of pJP3502 (Vanhercke et al., 2014). Transgenic plants containing the T-DNA from pOIL051 were selected by hygromycin resistance and transferred to soil in the glasshouse or in a controlled environment cabinet for continued growth. Leaf samples were harvested from confirmed double-transformants (T0 plants) before flowering, at flowering and at seed setting stages of plant development, and the TAG level in each determined. Transgenic plants containing only low levels of leaf TAG, or TAG at the same level as controls, were identified by means of lipid extraction from leaf samples and analysis by spot TLC and discarded. TAG levels in the remaining population of transformants were quantified by GC as described in Example 1. Before flowering, the majority of these plants exhibited greatly increased TAG levels (>5% of leaf dry weight) in their leaf tissue while 4 plants contained TAG levels above 10% (Table 3). The maximum TAG level observed in leaves of these plants, before flowering, was 11.3% in plant 51-13. As a comparison, the transgenic plants of the parental N. tabacum line expressing AtWRI1, AtDGAT1 and Oleosin displayed TAG levels of about 2% before flowering and about 6% during flowering (Vanhercke et al., 2014). The addition of the SDP1-inhibitory construct to the AtWRI1 plus AtDGAT1 combination was therefore synergistic for increasing the TAG levels in these plants. Surprisingly, the TAG content in leaves harvested from the doubly-transformed plants at flowering stage was greatly increased, observing 30.5% on a dry weight basis (Table 4), representing a 5-fold increase relative to the plants not silenced for SDP1. To the great amazement of the inventors, the TAG level reached an astonishing 70.7% (% of dry weight) in samples of senescing leaves (green and yellow) at the seed setting stage (Table 5). When NMR was used to measure the oil content of entire leaves from the tobacco plants at seed setting stage, the TAG content in some green leaves that had started senescing was about 43% and in some brown, desiccated leaves was 42%. When such leaves were pressed between two brown paper filters, the exuded oil soaked into the paper and made it translucent, whereas control tobacco leaves did not do so, providing a simple screening method for detecting plants having high oil content.

[1116] Two primary transformants (#61, #69) containing each of the T-DNAs from pJP3502 and pOIL51 and displaying high TAG levels were analyzed by digital PCR (ddPCR) using a hygromycin gene-specific primer pair to determine the number of pOIL51 T-DNA insertions. The plant designated #61 contained one T-DNA insertion from pOIL51, whereas plant #69 contained three T-DNA insertions from pOIL51. T1 progeny plants of both lines were screened again by ddPCR to identify homozygous, heterozygous and null plants. Progeny plants of plant #61 containing no insertions from pOIL51 (nulls; total of 7) or 2 T-DNA insertions (i.e. homozygous for that T-DNA; total of 12) were selected for further analysis. Similarly, progeny plants of line #69 containing zero T-DNA insertions from pOIL51 (nulls; total of 2) or 2 such insertions (total of 15) or 4 or 5 insertions (total of 5) were maintained for further analysis.

[1117] The selected T1 plants were grown in the glasshouse at the same time and under the same conditions as control plants. Green leaf tissue samples from the T1 plants before flowering were dried and total fatty acid (TFA) and TAG contents determined by GC analysis. TFA contents of the plants containing both T-DNAs ranged from 4.6% to 16.1% on a dry weight basis including TAG levels in the same leaves of 1.2% to 11.8% on a dry weight basis (FIG. 3). This was much greater compared to the plants containing only the T-DNA from pJP3502 and growing alongside under the same conditions and analysed at the same stage of growth, again showing the synergism between reducing TAG lipase activity and the WRI1 plus DGAT combination. Plants containing only the pJP3502 T-DNA contained between 4.2% and 6.8% TFA including TAG levels of 1.4% to 4.1% on a dry weight basis (FIG. 3). Wild-type plants contained, on average, about 0.8% TFA including less than 0.5% TAG on a dry weight basis. The fatty acid composition in the total fatty acid content and the TAG content of leaves from each of lines #61 and #69 were similar to the composition in leaves containing only the T-DNA from pJP3502 (parent). Compared to the wild-type control

TABLE 3
TAG levels (% leaf dry weight) and TAG fatty acid composition in leaf tissue from
N. tabacum plants (T0 generation) expressing WRI1, DGAT1 and Oleosin transgenes and
super-transformed with a T-DNA encoding an SDP1 hairpin construct (pOIL051), compared
to wild-type (untransformed). Leaf samples were harvested during vegetative stage
(before flowering). Lipid samples also contained 0.0-0.2% C16:3, 0.0-0.4% C20:1; 0.0-0.1% C20:2n-6.

| Line | C14:0 | C16:0 | C16:1 | C18:0 | C18:1 | C18:1d11 | C18:2 | C18:3n3 | C20:0 | C22:0 | C24:0 | % TAG |
|---|---|---|---|---|---|---|---|---|---|---|---|---|
| WT | 2.5 | 20.2 | 0.0 | 8.6 | 5.6 | 0.0 | 18.9 | 44.2 | 0.0 | 0.0 | 0.0 | 0.1 |
| 23-31 | 0.0 | 66.0 | 0.0 | 0.0 | 34.0 | 0.0 | 0.0 | 0.0 | 0.0 | 0.0 | 0.0 | 0.0 |
| 23-29 | 0.0 | 36.1 | 1.4 | 5.1 | 21.0 | 0.8 | 23.3 | 7.1 | 2.4 | 1.5 | 1.1 | 2.9 |
| 57 | 0.1 | 47.2 | 0.3 | 5.4 | 19.2 | 1.9 | 0.0 | 21.2 | 2.1 | 1.2 | 1.1 | 3.4 |
| 23-1 | 0.2 | 30.8 | 1.9 | 4.9 | 41.2 | 1.0 | 13.7 | 2.4 | 1.9 | 1.1 | 0.7 | 4.0 |
| 58 | 0.1 | 31.4 | 0.2 | 3.8 | 12.2 | 1.6 | 33.6 | 13.2 | 1.7 | 1.0 | 0.7 | 4.0 |
| 21 | 0.1 | 31.9 | 0.3 | 3.9 | 10.7 | 1.5 | 32.3 | 15.2 | 1.9 | 1.1 | 0.8 | 4.7 |
| 23-30 | 0.2 | 34.1 | 0.7 | 4.9 | 29.4 | 0.9 | 17.5 | 5.7 | 2.9 | 1.8 | 1.7 | 4.9 |
| 40 | 0.1 | 34.4 | 0.2 | 4.3 | 14.3 | 1.5 | 29.7 | 11.8 | 1.7 | 1.0 | 0.7 | 5.1 |
| 22 | 0.1 | 35.8 | 0.2 | 4.3 | 12.8 | 1.5 | 29.8 | 11.7 | 1.8 | 1.0 | 0.7 | 5.1 |
| 15 | 0.1 | 37.2 | 0.1 | 3.9 | 8.6 | 1.7 | 29.3 | 16.0 | 1.5 | 0.8 | 0.6 | 5.1 |
| 16 | 0.1 | 35.2 | 0.1 | 3.9 | 13.9 | 1.7 | 28.5 | 13.6 | 1.4 | 0.7 | 0.6 | 5.3 |
| 25 | 0.1 | 34.4 | 0.2 | 3.9 | 15.4 | 1.8 | 27.6 | 13.2 | 1.6 | 0.9 | 0.7 | 5.4 |
| 65 | 0.1 | 26.9 | 0.2 | 3.8 | 19.2 | 1.5 | 35.7 | 9.1 | 1.7 | 0.8 | 0.6 | 5.5 |
| 12 | 0.2 | 31.7 | 0.2 | 3.6 | 15.9 | 1.7 | 30.5 | 12.8 | 1.6 | 0.9 | 0.7 | 5.5 |
| 28 | 0.1 | 31.4 | 0.2 | 3.5 | 13.5 | 1.7 | 32.7 | 13.7 | 1.5 | 0.8 | 0.6 | 5.6 |
| 26 | 0.1 | 31.4 | 0.2 | 3.5 | 13.5 | 1.7 | 32.7 | 13.7 | 1.5 | 0.8 | 0.6 | 5.8 |
| 19 | 0.1 | 30.5 | 0.2 | 3.7 | 14.9 | 1.6 | 31.7 | 13.7 | 1.7 | 0.9 | 0.7 | 5.9 |
| 30 | 0.1 | 30.4 | 0.2 | 3.7 | 21.3 | 2.2 | 31.2 | 7.4 | 1.6 | 0.8 | 0.7 | 5.9 |
| 6 | 0.1 | 37.5 | 0.2 | 4.4 | 10.5 | 1.7 | 31.9 | 10.6 | 1.5 | 0.7 | 0.6 | 6.0 |
| 4 | 0.1 | 34.2 | 0.2 | 3.9 | 11.9 | 1.7 | 32.6 | 12.5 | 1.4 | 0.6 | 0.5 | 6.1 |
| 42 | 0.1 | 30.6 | 0.2 | 4.5 | 17.3 | 1.8 | 32.7 | 9.2 | 1.7 | 0.9 | 0.7 | 6.3 |
| 45 | 0.1 | 31.6 | 0.2 | 3.9 | 18.2 | 1.8 | 30.4 | 10.5 | 1.6 | 0.8 | 0.6 | 6.6 |
| 56 | 0.1 | 26.8 | 0.2 | 4.2 | 20.0 | 1.5 | 34.3 | 8.7 | 1.9 | 1.0 | 0.8 | 6.7 |
| 43 | 0.1 | 28.5 | 0.2 | 3.8 | 18.6 | 1.6 | 34.1 | 9.6 | 1.7 | 0.9 | 0.6 | 7.1 |
| 32 | 0.1 | 28.1 | 0.2 | 3.4 | 16.8 | 1.8 | 35.5 | 10.6 | 1.6 | 0.8 | 0.6 | 7.2 |
| 70 | 0.1 | 26.3 | 0.2 | 3.5 | 25.5 | 1.8 | 31.0 | 8.9 | 1.3 | 0.6 | 0.5 | 7.4 |
| 69 | 0.1 | 30.9 | 0.2 | 4.0 | 15.7 | 1.7 | 31.7 | 12.9 | 1.5 | 0.7 | 0.5 | 7.4 |
| 61 | 0.1 | 31.0 | 0.2 | 4.0 | 16.4 | 1.6 | 34.1 | 9.5 | 1.5 | 0.7 | 0.5 | 7.5 |
| 20 | 0.1 | 33.3 | 0.1 | 3.8 | 11.7 | 1.6 | 31.4 | 14.8 | 1.5 | 0.8 | 0.6 | 7.8 |
| 53 | 0.1 | 33.1 | 0.1 | 3.8 | 18.2 | 1.9 | 29.8 | 10.4 | 1.3 | 0.6 | 0.5 | 8.4 |
| 18 | 0.1 | 29.4 | 0.2 | 3.7 | 18.4 | 1.7 | 32.8 | 10.9 | 1.4 | 0.6 | 0.5 | 9.1 |
| 51-1 | 0.1 | 29.0 | 2.0 | 3.6 | 17.1 | 1.6 | 33.8 | 9.9 | 1.4 | 0.7 | 0.5 | 9.2 |
| 47 | 0.1 | 30.5 | 0.1 | 4.2 | 20.3 | 1.5 | 31.9 | 8.3 | 1.5 | 0.7 | 0.5 | 9.3 |
| 51-60 | 0.1 | 30.7 | 2.6 | 3.4 | 15.8 | 1.9 | 31.2 | 11.6 | 1.3 | 0.7 | 0.5 | 10.2 |
| 46 | 0.1 | 24.8 | 0.1 | 3.6 | 28.8 | 1.6 | 30.3 | 7.9 | 1.3 | 0.6 | 0.5 | 10.2 |
| 48 | 0.1 | 33.1 | 0.1 | 3.8 | 16.5 | 1.7 | 30.4 | 11.4 | 1.4 | 0.7 | 0.5 | 10.7 |
| 51-13 | 0.1 | 25.4 | 2.2 | 3.3 | 23.8 | 1.6 | 32.7 | 8.3 | 1.3 | 0.6 | 0.4 | 11.3 |

TABLE 4
TAG levels (% leaf dry weight) and TAG composition in leaf tissue from N. tabacum plants
(T0 generation) expressing WRI1, DGAT1 and Oleosin transgenes and supertransformed with a
T-DNA encoding an SDP1 hairpin construct (pOIL051). Leaf samples were harvested during flowering.

| Line | C14:0 | C16:0 | C16:1 | C18:0 | C18:1 | C18:1d11 | C18:2 | C18:3n3 | C20:0 | C22:0 | C24:0 | % TAG |
|---|---|---|---|---|---|---|---|---|---|---|---|---|
| WT | 0.2 | 14.8 | 0.6 | 8.5 | 9.2 | 0.3 | 20.0 | 44.5 | 0.6 | 0.3 | 0.4 | 0.3 |
| 21 | 0.1 | 25.7 | 2.1 | 3.7 | 21.2 | 1.0 | 31.0 | 11.7 | 1.5 | 0.8 | 0.6 | 8.8 |
| 56 | 0.1 | 33.2 | 1.4 | 4.9 | 20.7 | 1.0 | 26.3 | 7.4 | 2.1 | 1.3 | 0.9 | 9.2 |
| 65 | 0.1 | 24.7 | 1.5 | 3.8 | 28.5 | 1.0 | 29.0 | 7.5 | 1.7 | 0.9 | 0.6 | 12.0 |
| 42 | 0.1 | 34.0 | 1.5 | 4.4 | 16.8 | 1.1 | 29.4 | 7.6 | 2.2 | 1.4 | 1.1 | 13.1 |
| 28 | 0.1 | 29.5 | 2.4 | 3.5 | 16.4 | 1.2 | 28.7 | 14.6 | 1.5 | 1.0 | 0.6 | 13.2 |
| 30 | 0.1 | 19.1 | 1.9 | 3.3 | 31.8 | 1.0 | 30.6 | 9.3 | 1.3 | 0.7 | 0.4 | 13.6 |
| 20 | 0.1 | 22.4 | 1.8 | 3.7 | 27.4 | 0.9 | 29.0 | 10.8 | 1.7 | 0.9 | 0.7 | 14.6 |
| 19 | 0.1 | 20.9 | 1.7 | 3.1 | 28.4 | 1.0 | 31.6 | 10.0 | 1.4 | 0.8 | 0.5 | 15.7 |
| 12 | 0.1 | 24.4 | 1.6 | 3.6 | 22.1 | 0.9 | 35.1 | 8.9 | 1.4 | 0.8 | 0.5 | 15.8 |
| 16 | 0.1 | 21.5 | 1.8 | 3.4 | 34.9 | 1.0 | 26.2 | 7.9 | 1.4 | 0.7 | 0.5 | 16.4 |
| 57 | 0.1 | 25.0 | 1.7 | 4.1 | 27.7 | 1.0 | 28.4 | 8.4 | 1.6 | 0.9 | 0.6 | 17.2 |
| 26 | 0.1 | 22.5 | 1.6 | 3.5 | 28.4 | 1.1 | 31.2 | 7.6 | 1.7 | 1.0 | 0.7 | 18.0 |
| 39 | 0.1 | 30.0 | 2.2 | 3.7 | 22.7 | 1.6 | 24.3 | 11.6 | 1.5 | 0.9 | 0.7 | 18.1 |
| 70 | 0.1 | 22.1 | 2.1 | 3.6 | 36.3 | 1.0 | 24.2 | 7.2 | 1.4 | 0.7 | 0.5 | 18.3 |
| 45 | 0.1 | 21.4 | 1.8 | 3.7 | 34.4 | 1.0 | 27.5 | 6.9 | 1.4 | 0.8 | 0.5 | 19.1 |
| 32 | 0.1 | 23.3 | 1.6 | 3.2 | 24.4 | 1.1 | 33.6 | 9.0 | 1.5 | 0.9 | 0.6 | 19.5 |
| 18 | 0.1 | 23.4 | 2.1 | 3.3 | 26.4 | 0.9 | 30.2 | 10.3 | 1.4 | 0.7 | 0.5 | 20.6 |
| 20Y | 0.1 | 22.3 | 1.6 | 3.6 | 30.3 | 0.9 | 28.5 | 9.1 | 1.6 | 0.9 | 0.6 | 20.8 |
| 43 | 0.1 | 28.1 | 2.0 | 3.5 | 21.5 | 1.2 | 29.9 | 10.2 | 1.5 | 0.9 | 0.6 | 21.2 |
| 4 | 0.1 | 27.9 | 1.9 | 3.7 | 26.3 | 1.2 | 26.2 | 9.3 | 1.5 | 0.8 | 0.5 | 21.8 |
| 1 | 0.1 | 23.8 | 2.0 | 3.7 | 30.2 | 1.1 | 28.1 | 8.0 | 1.4 | 0.7 | 0.5 | 22.3 |
| 61 | 0.1 | 24.2 | 2.2 | 4.0 | 32.0 | 1.1 | 25.2 | 7.8 | 1.5 | 0.8 | 0.6 | 23.9 |
| 60 | 0.1 | 24.4 | 2.2 | 3.7 | 31.0 | 1.1 | 25.4 | 8.6 | 1.5 | 0.8 | 0.6 | 25.0 |
| 46 | 0.1 | 23.3 | 2.0 | 3.7 | 32.9 | 1.0 | 24.0 | 9.2 | 1.6 | 0.9 | 0.7 | 25.7 |
| 6 | 0.1 | 31.5 | 2.6 | 3.5 | 19.5 | 1.6 | 25.5 | 12.7 | 1.3 | 0.7 | 0.5 | 26.3 |
| 13 | 0.1 | 21.8 | 1.9 | 3.6 | 35.1 | 1.0 | 25.1 | 8.1 | 1.5 | 0.8 | 0.5 | 26.8 |
| 69 | 0.1 | 21.8 | 1.6 | 4.3 | 33.4 | 0.8 | 26.9 | 7.6 | 1.7 | 0.8 | 0.5 | 26.9 |
| 53 | 0.1 | 27.1 | 2.1 | 3.5 | 24.1 | 1.2 | 29.4 | 9.2 | 1.4 | 0.8 | 0.5 | 29.2 |
| 48 | 0.1 | 29.5 | 2.5 | 3.9 | 21.1 | 1.3 | 29.0 | 9.2 | 1.6 | 0.8 | 0.6 | 29.5 |
| 47 | 0.1 | 30.9 | 2.5 | 3.4 | 19.4 | 1.5 | 28.5 | 10.6 | 1.3 | 0.8 | 0.5 | 30.5 |

TABLE 5
TAG content (% leaf dry weight) and TAG composition in leaf tissue from N. tabacum plants
(T0 generation) expressing WRI1, DGAT1 and Oleosin transgenes and supertransformed with a
T-DNA encoding an SDP1 hairpin construct (pOIL051). Leaf samples were harvested at seed
setting stage. Y = yellow leaf, G = green leaf.

| | | | | | | | | | | | | | | TAG |
|---|---|---|---|---|---|---|---|---|---|---|---|---|---|---|
| Sample | C14:0 | C16:0 | C16:1 | 16:3 | C18:0 | C18:1 | C18:1d11 | C18:2 | C18:3n3 | C20:0 | C20:1d11 | C22:0 | C24:0 | content |
| wt | 0.0 | 13.0 | 0.0 | 0.0 | 8.4 | 7.0 | 0.0 | 24.7 | 46.8 | 0.0 | 0.0 | 0.0 | 0.0 | 0.3 |
| 73 | 0.0 | 26.6 | 1.7 | 0.0 | 8.5 | 9.4 | 0.0 | 27.0 | 25.6 | 1.1 | 0.0 | 0.0 | 0.0 | 0.6 |
| 18 | 0.1 | 15.0 | 1.8 | 0.0 | 4.8 | 14.4 | 0.4 | 43.9 | 16.3 | 1.7 | 0.4 | 0.7 | 0.5 | 3.3 |
| 41 | 0.1 | 22.3 | 1.2 | 0.3 | 4.4 | 24.0 | 0.6 | 32.8 | 10.8 | 1.7 | 0.3 | 0.8 | 0.5 | 5.2 |
| 19 | 0.1 | 14.5 | 1.5 | 0.3 | 3.0 | 21.6 | 0.7 | 44.8 | 10.6 | 1.4 | 0.4 | 0.7 | 0.4 | 7.2 |
| 20 | 0.1 | 26.7 | 2.4 | 0.1 | 4.3 | 24.9 | 1.0 | 25.2 | 11.3 | 1.9 | 0.3 | 1.0 | 0.8 | 9.6 |
| 30 | 0.1 | 18.6 | 1.5 | 0.3 | 3.5 | 24.8 | 0.7 | 38.9 | 8.9 | 1.4 | 0.3 | 0.7 | 0.4 | 9.9 |
| 65 | 0.1 | 22.2 | 1.4 | 0.3 | 3.5 | 30.9 | 0.7 | 29.1 | 8.1 | 1.7 | 0.3 | 1.0 | 0.6 | 11.3 |
| 42 | 0.1 | 23.6 | 1.5 | 0.2 | 4.1 | 29.0 | 0.9 | 30.3 | 5.9 | 2.0 | 0.4 | 1.3 | 0.8 | 12.0 |
| 32 | 0.1 | 21.3 | 1.3 | 0.3 | 3.3 | 21.4 | 0.9 | 40.7 | 7.1 | 1.7 | 0.3 | 1.0 | 0.6 | 13.7 |
| 39 | 0.1 | 25.8 | 1.7 | 0.3 | 3.6 | 27.2 | 1.2 | 27.2 | 8.2 | 2.0 | 0.4 | 1.4 | 0.9 | 14.0 |
| 45 | 0.1 | 23.0 | 1.5 | 0.1 | 3.8 | 28.0 | 0.9 | 32.6 | 6.3 | 1.8 | 0.3 | 1.0 | 0.6 | 14.4 |
| 13 | 0.1 | 26.9 | 2.8 | 0.1 | 3.7 | 32.6 | 1.1 | 21.6 | 7.6 | 1.6 | 0.3 | 0.8 | 0.7 | 14.6 |
| R45 | 0.1 | 23.4 | 1.5 | 0.2 | 4.1 | 27.8 | 0.9 | 32.2 | 6.1 | 1.8 | 0.3 | 1.0 | 0.6 | 14.6 |
| 21 | 0.1 | 23.1 | 1.6 | 0.2 | 3.5 | 27.4 | 0.8 | 31.2 | 8.2 | 1.8 | 0.3 | 1.1 | 0.7 | 15.0 |
| 9 | 0.1 | 23.2 | 1.4 | 0.2 | 3.5 | 23.3 | 0.8 | 35.6 | 8.5 | 1.6 | 0.3 | 0.9 | 0.5 | 15.4 |
| 12 | 0.1 | 24.5 | 1.4 | 0.2 | 3.4 | 22.3 | 0.8 | 36.2 | 7.4 | 1.7 | 0.3 | 1.1 | 0.7 | 15.9 |
| 4 | 0.1 | 21.9 | 1.8 | 0.2 | 3.6 | 22.8 | 0.9 | 35.9 | 9.5 | 1.6 | 0.3 | 0.9 | 0.6 | 16.1 |
| 49 | 0.1 | 23.5 | 1.4 | 0.2 | 4.0 | 25.3 | 0.8 | 34.3 | 6.6 | 1.8 | 0.3 | 1.1 | 0.7 | 16.8 |
| 26 | 0.1 | 22.2 | 1.3 | 0.2 | 3.8 | 25.4 | 0.8 | 35.2 | 6.5 | 2.1 | 0.3 | 1.3 | 0.8 | 17.2 |
| 16 | 0.1 | 22.2 | 1.8 | 0.3 | 3.4 | 29.9 | 0.8 | 30.1 | 8.1 | 1.5 | 0.3 | 0.9 | 0.6 | 18.2 |
| 1 | 0.1 | 27.4 | 2.7 | 0.1 | 4.0 | 32.0 | 1.2 | 22.9 | 6.3 | 1.6 | 0.3 | 0.8 | 0.7 | 18.7 |
| 70 | 0.1 | 27.1 | 2.7 | 0.2 | 3.7 | 32.6 | 1.0 | 21.5 | 7.6 | 1.6 | 0.3 | 0.8 | 0.7 | 19.0 |
| 6 | 0.1 | 30.6 | 2.6 | 0.2 | 3.3 | 13.0 | 1.4 | 32.8 | 12.9 | 1.4 | 0.2 | 0.9 | 0.6 | 21.5 |
| 47 | 0.1 | 28.0 | 2.1 | 0.2 | 3.6 | 18.5 | 1.3 | 33.2 | 9.9 | 1.5 | 0.2 | 0.9 | 0.5 | 21.6 |
| 69 | 0.1 | 25.4 | 2.3 | 0.1 | 4.3 | 32.4 | 0.9 | 23.5 | 7.4 | 1.8 | 0.3 | 0.8 | 0.6 | 22.5 |
| 53 | 0.1 | 23.9 | 2.1 | 0.2 | 3.4 | 28.2 | 1.1 | 30.2 | 7.6 | 1.5 | 0.3 | 0.9 | 0.5 | 23.2 |
| 46 | 0.1 | 25.9 | 2.7 | 0.2 | 3.7 | 32.0 | 1.1 | 22.8 | 8.2 | 1.6 | 0.3 | 0.8 | 0.7 | 24.0 |
| 43 | 0.1 | 23.7 | 1.6 | 0.2 | 3.1 | 22.6 | 0.9 | 37.6 | 7.4 | 1.4 | 0.2 | 0.8 | 0.5 | 24.0 |
| 48 | 0.1 | 27.4 | 2.2 | 0.1 | 4.1 | 23.0 | 1.1 | 31.3 | 6.9 | 1.9 | 0.3 | 1.0 | 0.7 | 24.4 |
| 28 | 0.1 | 23.0 | 1.4 | 0.2 | 3.3 | 24.8 | 1.0 | 35.6 | 7.3 | 1.6 | 0.3 | 0.9 | 0.6 | 26.6 |
| 1Y | 0.1 | 24.3 | 2.5 | 0.1 | 3.8 | 35.7 | 1.1 | 22.6 | 6.7 | 1.6 | 0.3 | 0.7 | 0.6 | 28.1 |
| 56G | 0.1 | 25.5 | 1.8 | 0.2 | 3.7 | 26.7 | 0.9 | 29.8 | 7.3 | 1.8 | 0.3 | 1.1 | 0.7 | 33.9 |
| 57 | 0.1 | 25.1 | 1.9 | 0.2 | 3.2 | 20.1 | 1.0 | 35.2 | 10.0 | 1.5 | 0.3 | 0.9 | 0.6 | 35.4 |
| 56Y | 0.2 | 24.8 | 1.4 | 0.2 | 4.1 | 27.2 | 0.8 | 31.0 | 6.0 | 2.0 | 0.4 | 1.2 | 0.8 | 39.6 |
| 69Y | 0.1 | 24.7 | 2.1 | 0.2 | 4.1 | 32.0 | 0.8 | 24.3 | 7.8 | 1.9 | 0.3 | 0.9 | 0.7 | 46.5 |
| R69Y | 0.1 | 24.7 | 2.1 | 0.2 | 4.1 | 32.0 | 0.8 | 24.4 | 7.9 | 1.9 | 0.3 | 0.9 | 0.7 | 46.8 |
| 61 | 0.1 | 26.6 | 2.7 | 0.1 | 3.6 | 31.6 | 1.1 | 23.8 | 7.4 | 1.4 | 0.3 | 0.7 | 0.5 | 49.2 |
| 61Y | 0.1 | 25.8 | 2.4 | 0.1 | 3.7 | 32.4 | 1.1 | 24.3 | 6.9 | 1.5 | 0.3 | 0.7 | 0.5 | 58.1 |
| 60 | 0.1 | 24.6 | 2.4 | 0.2 | 3.6 | 34.1 | 1.0 | 24.4 | 6.4 | 1.5 | 0.3 | 0.7 | 0.5 | 70.7 |

leaves, plants containing both of the T-DNAs from pOIL51 and pJP3502 exhibited increased levels of C16:0, C18:1 and C18:2 fatty acids. This significant shift in fatty acid composition came largely at the expense of C18:3 which was reduced from about 50-55% to about 20-30% as a percentage of the total fatty acid content.

[1118] The substantial increase in TFA levels including the TAG levels between the plants containing only the pJP3502 T-DNA and plants containing the T-DNAs from both pOIL51 and pJP3502 was maintained throughout plant development. Control plants containing only the T-DNA from pJP3502 contained 7.7% to 17.5% TAG during flowering while TAG levels ranged from 14.1% to 20.7% on a dry weight basis during seed setting. The TAG content in leaves from plants containing both pJP3502 and pOIL51 T-DNAs varied between 6.3% and 23.3% during flowering and 12.6% and 33.6% during seed setting. Similar changes in fatty acid composition of the TAG fraction at both stages were detected as described earlier for the vegetative growth stage.

[1119] TAG levels were also found to be increased further in other vegetative tissues of the transgenic plants such as roots and stem. Some root tissues of the transgenic N. tabacum plants transformed with the T-DNA of pOIL051 contained 4.4% TAG, and some stem tissues 7.4% TAG, on a dry weight basis (FIG. 4). Wild-type plants and N. tabacum containing only the T-DNA from pJP3502 exhibited much lower TAG levels in both tissues. The addition of the hairpin SDP1 construct to decrease expression of the endogenous TAG lipase was clearly synergistic with the genes encoding the transcription factor and biosynthesis of TAG (WRI1 and DGAT) for increasing TAG content in the stems and roots. Of note, TAG levels in the roots were lower compared to stem tissue within the same plant while an inverse trend was observed in wild-type plants and N. tabacum containing only the T-DNA from pJP3502. The TAG composition of root and stem tissues exhibited similar changes in C18:1 and C18:3 fatty acids as observed previously in transgenic leaf tissue. C18:2 levels in TAG were reduced in transgenic stem tissue while C16 fatty acids were typically reduced in transgenic root tissues when compared to the wild-type control.

[1120] Therefore, the inventors concluded that addition of an exogenous gene for silencing the endogenous SDP1 gene to the combination of WRI1 and DGAT increased the total fatty acid content, including the TAG content, at all stages of the plant growth, and acted synergistically with WRI1 and DGAT, particularly in the stems and roots.

[1121] T1 seeds from the transgenic plants were plated on tissue culture media in vitro at room temperature to test the extent and timing of germination. Germination of T1 seed from three independently transformed lines was the same compared to seed from the transgenic plants transformed only with the T-DNA from pJP3502. Furthermore, early seedling vigour appeared to be unaffected. This was surprising given the role of SDP1 in germination in A. thaliana seeds and the observed defects in germination in SDP1 mutants (Eastmond et al., 2006). To overcome any germination defects if such had occurred, a second construct is designed in which the SDP1 inhibitory RNA is expressed from a promoter which is essentially not expressed, or at low levels, in seed, such as for example a promoter from a photosynthetic gene such as SSU. The inventors consider that it is beneficial to reduce the risk of deleterious effects on seed germination or early seedling vigour to avoid a constitutive promoter, or at least to avoid a promoter expressed in seeds, to drive expression of the SDP1 inhibitory RNA.

[1122] It was noted that the T0 plants with the highest TAG levels had been grown under high light conditions in the controlled environment room (500 micro moles light intensity, 16 hr light/26° C.-8 hr dark/18° C. day cycle) and appeared smaller (about 70% in height relative to the plants transformed with the T-DNA from pJP3502) than the wild-type control plants. The inventors concluded that the combination of transgenes and/or genetic modifications for the “push”, “pull”, “protect” and “package” approaches was particularly favourable for achieving high levels of TAG in vegetative plant parts. In this example, WRI1 provided the “push”, DGAT provided the “pull”, silencing of SDP1 provided the “protect” and Oleosin provided the “packaging” of TAG.

### Example 3. Senescence-Specific Expression of a Transcription Factor

[1123] Ectopic expression of master regulators of embryo and seed development such as LEC2 have been reported to increase TAG levels in non-seed tissues (Santos-Mendoza et al., 2005; Slocombe et al., 2009; Andrianov et al., 2010). However, constitutive over-expression of LEC2 in plants transformed with a 35S-LEC2 gene resulted in unwanted pleiotropic effects on plant development and morphology including somatic embryogenesis and abnormal leaf structures (Stone et al., 2001; Santos-Mendoza et al., 2005). To test whether limiting LEC2 expression to the leaf senescence stage of plant development, i.e. after plants had fully grown and reached their full biomass, would minimize undesirable phenotypic effects but still increase leaf lipid levels, a chimeric DNA was designed and made for expression of LEC2 under the control of a A. thaliana senescence specific promoter from the SAG12 gene (U37336; Gan and Amasino, 1995).

[1124] To make the genetic construct, a 3.635 kb synthetic DNA fragment was made comprising, in order, an A. thaliana SAG12 senescence-specific promoter, the LEC2 protein coding sequence and a Glycine max Lectin gene terminator/polyadenylation region. This fragment was inserted between the SacI and NotI restriction sites of pJP3303. This construct was designated pOIL049 and tested in leaves of N. tabacum plants which were stably transformed with genes encoding WRI1, DGAT1 and Oleosin polypeptides, containing the T-DNA from pJP3502. Using Agrobacterium-mediated transformation methods, the pOIL049 construct was used to transform N. tabacum plant cells which were homozygous for the T-DNA of pJP3502. Transgenic plants comprising the genes from pOIL049 were selected by hygromycin resistance and were grown to maturity in the glasshouse. Samples are taken from transgenic leaf tissue at different stages of growth including at leaf senescence and contain increased TAG levels compared to the N. tabacum pJP3502 parent line.

[1125] A total of 149 independent T0 plants (i.e. primary transformants) were obtained. Upper green leaves of all plants and the lower brown, fully senesced leaves of selected events were sampled at the seed setting stage of plant development and TAG contents were quantified by TLC-GC. The number of pOIL49 T-DNA insertions in selected plants was determined by ddPCR using a hygromycin gene-specific primer pair. A TAG level of 30.2% on a dry weight basis was observed in green leaf tissue harvested at seed setting stage. TAG levels in brown leaves were lower in most of the plants sampled. However, three plants (#32b, #8b and #23c) displayed greater TAG levels in brown senesced leaf tissue than in the green expanding leaves. These plants contained 1, 2 or 3 T-DNA insertions from pOIL49.

[1126] T1 progeny of plants #23c and #32b were screened by ddPCR to identify nulls, heterozygous and homozygous plants for the T-DNA from pOIL049. Progeny plants of plant #23c containing zero T-DNA insertions from pOIL049 (nulls; total of 7) or two T-DNA insertions of the T-DNA from pOIL049 (homozygous; total of 4) were selected for further analysis. Similarly, progeny plants of plant #32b containing zero insertions (nulls; total of 6) or two insertions (homozygous; total of 9) were maintained for further analysis. Green leaf tissue was sampled before flowering and TFA and TAG contents were determined by GC. Wild-type plants and plants transformed with the T-DNA from pJP3502 were the same as before (Example 2) and were grown alongside in the same glasshouse. TFA levels in leaves of the transformants containing the T-DNA from pOIL049 ranged from 5.2% to 19.5% on a dry weight basis before flowering (FIG. 5). TAG levels in the same tissues ranged from 0.8% to 15.4% on a dry weight basis. This was considerably greater than in plants containing only the T-DNA from pJP3502. TAG levels in plants containing the T-DNAs from pJP3502 and pOIL049 further increased to 38.5% and 34.9% during flowering and seed setting, respectively. When the fatty acid composition of the total fatty acid content was analysed for leaves homozygous for the T-DNA from pOIL049, increased levels of C18:2 and reduced levels of C18:3 were observed (FIG. 5) while the percentages of C16:0 and C18:1 remained about the same relative to leaves transformed only with the T-DNA from pJP3502. These data demonstrated that the addition of a second transcription factor gene under the control of a non-constitutive promoter to provide developmentally-regulated expression was able to further increase TAG levels in vegetative tissues of a plant. The data also indicated that the senescence-specific promoter SAG12 had some expression in the green tissue prior to senescence of the leaves.

[1127] TAG levels were much increased in stem tissue when compared to both wild-type N. tabacum plants and transgenic plants containing the T-DNA from pJP3502 alone. Some stem tissues of the transgenic N. tabacum plants transformed with the T-DNA from pOIL049 contained 4.9% TAG on a dry weight basis (FIG. 6). On the other hand, TAG levels in root tissue exhibited large variation between the three pOIL049 plants with some root tissues containing 3.4% TAG. Of note, TAG levels in roots were lower compared to stem tissue within the same plant while an inverse trend was observed in wild-type plants and N. tabacum containing only the T-DNA from pJP3502. The TAG composition of root and stem tissues exhibited similar changes in C18:1 and C18:3 fatty acids as observed previously in transgenic leaf tissue. C18:2 levels in TAG were reduced in transgenic stem tissue while C16 fatty acids were typically reduced in transgenic root tissues when compared to the wild-type control.

[1128] Corresponding genetic constructs are made encoding other transcription factors under the control of the SAG12 promoter, namely LEC1, LEC1 like, FUS3, ABI3, ABI4 and ABI5 and others (see Example 9). For example, additional constructs were made for the expression of the monocot transcription factor Zea mays LEC1 (Shen et al., 2010) or Sorghum bicolor LEC1 (Genbank Accession No. XM_002452582.1) under the control of monocot-derived homolog of the A. thaliana SAG12 promoter such as the maize SEE1 promoter (Robson et al., 2004). Further constructs are made for expression of the transcription factors under developmentally controlled promoters, for example which are preferentially expressed at flowering (e.g. day length sensitive promoters), Phytochrome promoters, Chryptochrome promoters, or in plant stems during secondary growth such as a promoter from a CesA gene. These constructs are used to transform plants, and plants which produce at least 8% TAG in vegetative parts are selected.

### Example 4. Analysis of Transgenic Plants

### Plant Material and Growth Conditions

[1129] Plants of three TAG accumulating transgenic lines were grown in growth cabinets or in a glasshouse under controlled conditions:
[1130] 1. Plants over-expressing genes encoding WRI1, DGAT and oleosin (Vanhercke et al, 2014), designated here as HO plants, being plants of the T2 generation which were homozygous for the introduced T-DNA from pJP3052.
[1131] 2. T1 plants transformed with an RNAi construct to silence the SDP1 TAG lipase as well as the T-DNA from pJP3502, encoding the WRI1, DGAT and oleosin polypeptides, from two independent transformed lines. See Example 2. These plants were designated SDP1.
[1132] 3. T1 plants transformed with a genetic construct for over-expressing the transcription factor LEC2 from the SAG12 promoter, as well as the T-DNA from pJP3502 encoding the WRI1, DGAT and oleosin polypeptides. See Example 3. These plants were designated LEC2, and were progeny from a single T0 plant.

[1133] Wild-type plants (WT, of cultivar Wisconsin 38) were used as control plants and grown at the same time and under the same conditions as the transgenic plants. For vegetative samples, WT and HO tobacco plants were grown in PGC20/PGC20FLEX plant growth cabinets (Conviron) at ambient CO₂ concentrations with 250-450 μmol m⁻² s⁻¹ illumination from fluorescent bulbs. Plants were grown under 1212 light/25° C.: 12 hr dark/20° C. daily cycles. Plants from which samples were to be harvested at 49 days after sowing (DAS) were grown in 1.25 litre pots in soil with osmocote fertiliser. Plants from which samples were to be harvested at 69 DAS were grown in 4 litre pots in soil and watered every 14 days with aquasol fertiliser. For all assays, samples were taken from four plants of each genotype. For samples to be harvested at seed-setting stage of growth, WT, HO, SDP1 and LEC2 plants were grown in a glasshouse without artificial light (n=3, 3, 8, 6, respectively). For all analyses, leaf discs were harvested from leaves at the end of the growth phase with light, snap frozen and stored at −80° C. until analysis.

### TAG Levels and Fatty Acid Composition

[1134] TAG levels were measured in leaves of mature WT, HO, SDP1 and LEC2 plants. The fatty acid composition in TAG of the leaves was also determined. The data are shown in Table 6 for the LEC2 and SDP1 plants.

### Starch and Sugar Levels

[1135] Starch and soluble sugar levels were measured in leaf tissue sampled from the wild-type (WT) and transgenic HO, SDP1 and LEC2 plants. In general, an inverse correlation was found between TAG and starch levels in leaf tissue on a dry weight basis in the leaves having both T-DNAs (FIG. 7 and FIG. 8). In contrast, leaf soluble sugars levels were about the same in the transgenic plants as in the wild-type plants, suggesting that there was no significant bottleneck in the conversion from sugars to TAG. An effect of the leaf position in the plants was observed in wild-type plants where starch levels tended to increase from lower leaf to higher leaf position. No such effect was detected in the transgenic plants.

### Carbon and Energy Contents

[1136] The amounts of carbon and energy in the TAG, starch and sugar contents in leaves of the HO, SDP1 and LEC2 plants were measured and compared to wild-type plants, on a dry weight basis. The data (Table 7) showed that each of the carbon and energy contents increased in the HO plants and increased even further in the SDP1 and LEC2 plants relative to the WT plants. The increase was seen for the sum of TAG, starch and soluble sugars, as well as for the sum of TAG and starch. It was concluded that the increase in carbon content by increasing the TAG content more than compensated for the reduced starch content. Therefore, the transgenic plants exhibited increased total carbon content and increased total energy content on a dry weight basis.

### Nitrogen and Soluble Protein Contents

[1137] Nitrogen and protein contents were measured in leaf samples of the transformed and control plants as described in Example 1, for plants at 69 DAS. The third leaf from the top of each of the WT and HO tobacco plants, which leaves were not yet fully expanded and therefore still growing, had the same nitrogen content at about 3.0% by DW. Older (lower) leaves on each plant were also analysed. In the WT plants, the leaf nitrogen content decreased with leaf age, whereas the nitrogen content was relatively maintained in older HO leaves with less of a decline compared to the WT plants. For example, older leaves such as leaf 11 from the top of the HO plants had more than twice as much nitrogen (2.9%) compared to the corresponding leaves in WT plants (1.3%; FIG. 9a). A similar trend was observed for total soluble protein with twice as much soluble protein detected in older HO leaves compared to WT (10.4 and 5.0 μg/mg FW, respectively; FIG. 9B). The same trends were observed when soluble

TABLE 6
TAG levels (% leaf dry weight) and fatty acid composition in TAG of selected N. tabacum primary
transformants over-expressing LEC2 (pOIL049) or a silencing construct targeted against the gene
encoding SDP1 TAG lipase (pOIL051). Both constructs were transformed independently into a previously
established N. tabacum transgenic line over-expressing genes encoding WRI1, DGAT1 and OLEOSIN
(Vanhercke et al., 2014).

| Transgene | Line | Leaf | C16:0 | C16:1 | C18:0 | C18:1^{Δ9} | C18:2^{Δ 9,12} | C18:3^{Δ9,12,15} | Other | % TAG |
|---|---|---|---|---|---|---|---|---|---|---|
| LEC2 | #8 | green | 28.3 | 3.1 | 3.2 | 19.8 | 30.5 | 10.2 | 5.0 | 8.3 |
| | #8 | brown | 31.1 | 2.4 | 3.7 | 16.5 | 32.4 | 7.7 | 6.2 | 12.6 |
| LEC2 | #23 | green | 26.6 | 5.5 | 0.1 | 5.4 | 48.0 | 7.3 | 7.2 | 14.3 |
| | #23 | brown | 26.2 | 5.2 | 2.5 | 3.5 | 47.0 | 8.1 | 7.5 | 28.7 |
| LEC2 | #32 | green | 28.0 | 1.0 | 4.3 | 19.7 | 29.2 | 10.9 | 6.7 | 5.8 |
| | #32 | brown | 22.3 | 3.1 | 2.4 | 19.7 | 39.0 | 7.2 | 6.3 | 14.0 |
| SDP1 | #60 | brown | 28.0 | 3.8 | 3.1 | 35.9 | 19.7 | 5.8 | 3.6 | 26.4 |
| SDP1 | #61 | brown | 27.7 | 3.7 | 3.4 | 34.0 | 20.7 | 6.5 | 4.0 | 27.9 |
| SDP1 | #69 | yellow-green | 28.1 | 3.4 | 3.6 | 29.5 | 23.3 | 8.1 | 3.9 | 32.9 |

TABLE 7
Carbon and energy contents of TAG, starch and soluble sugars
in leaf tissues of wild-type and transgenic N. tabacum plants.

| | Carbon (mmol C/gDW) | | | Energy (kJ/g DW)* | | |
|---|---|---|---|---|---|---|
| | | | Soluble | | | Soluble |
| | TAG | Starch | sugars | TAG | Starch | sugars |
| wt1 | 0.08 | 15.41 | 1.33 | 0.05 | 7.20 | 0.62 |
| wt6 | 0.08 | 12.01 | 1.29 | 0.05 | 5.61 | 0.60 |
| wt7 | 0.09 | 11.10 | 1.37 | 0.06 | 5.18 | 0.64 |
| HO #2 | 10.69 | 5.43 | 1.24 | 6.59 | 2.54 | 0.58 |
| HO #5 | 8.63 | 10.78 | 1.86 | 5.32 | 5.04 | 0.87 |
| HO #7 | 9.51 | 8.22 | 1.47 | 5.86 | 3.84 | 0.69 |
| SDP1 #69-1 | 19.56 | 2.83 | 1.61 | 12.05 | 1.32 | 0.75 |
| SDP1 #69-60 | 21.44 | 3.11 | 2.03 | 13.21 | 1.45 | 0.95 |
| SDP1 #69-91 | 16.78 | 0.68 | 1.71 | 10.33 | 0.32 | 0.80 |
| LEC2 #32-21 | 14.99 | 0.57 | 0.88 | 9.23 | 0.27 | 0.41 |
| LEC2 #32-29 | 19.19 | 0.86 | 0.82 | 11.82 | 0.40 | 0.39 |

*assuming 2803 kJ/mol for glucose and 35114 kJ/mol for triolein (Sanjaya et al., 2011)

protein samples were electrophoresed by SDS-PAGE, after normalising sample loading according to leaf fresh weights.

[1138] In both WT and HO plants, leaf protein content increased with plant age (FIG. 10, Table 8). In younger plants (49 DAS), soluble protein content was slightly but not significantly higher in older leaves from HO plants compared to WT. By 69 DAS, this difference was significant with an 87% increase in old HO leaves compared to WT (p<0.05, t-test). It was concluded that the leaves of the HO plants had significantly increased nitrogen and protein contents relative to the corresponding leaves in the WT plants. In this context, a “corresponding leaf” meant a leaf of the same age of a plant grown under the same conditions.

TABLE 8
Leaf soluble protein content in WT and HO tobacco (μg/mg
FW). Range includes young, mature and older leaves
of younger (49 DAS) and older (69 DAS) plants.

| | |
|---|---|
| WT | HO |

| Plant age | 49 DAS | 69 DAS | 49 DAS | 69 DAS |
|---|---|---|---|---|
| Range | 4.3-9.9 | 3.0-15.2 | 2.5-11.3 | 7.9-19.1 |

### Nitrogen Content in SDP1 and LEC2 Plants

[1139] The transgenic plants designated LEC2 and SDP1 exhibited increased TAG accumulation compared to the HO plants throughout growth (Examples 2 and 3), increasing with plant age. Leaf samples of the transgenic plants grown in growth cabinets or in the glasshouse were assayed for nitrogen, protein and carbon contents. The LEC2 and SDP1 plants exhibited each of increased leaf carbon content, leaf nitrogen content and soluble protein content relative to the WT plants (Table 9). At the seed setting stage of growth, the LEC2 and SDP1 leaves had between 50% and 100% more nitrogen than WT leaves. The leaf soluble protein content increased between 40% and 87% in LEC2 and SDP1 leaves, respectively, relative to the WT leaves. Leaf carbon content also increased. Despite moderate increases in leaf carbon content (16% to 21%) in LEC2 and SDP1 lines, the greater relative increase in leaf nitrogen content decreased the carbon to nitrogen ratio by up to 40% compared to WT leaves.

### Total Dietary Fibre (TDF)

[1140] Analysis of the total dietary fibre of WT, SDP1 and LEC2 in mature leaves obtained at flowering showed that WT leaves had a TDF content of 27%, SDP1 leaves had a TDF content of 15.9% (59% reduction when compared to WT), and LEC2 leaves had a TDF content of 17.9% (34% reduction when compared to WT).

TABLE 9
TAG content (% dry weight), carbon content, nitrogen content and
soluble protein content of WT, LEC2 and SDP1 tobacco leaves. For
TAG analysis n = 3-8 and for C, N and soluble protein n = 2-5.

| | | | | | Soluble |
|---|---|---|---|---|---|
| | TAG | Nitrogen | Carbon | | protein |
| | content | content | content | C:N rato | content |
| WT | 0.17 | 0.50 | 43.08 | 86:1 | 1.47 |
| LEC2 | 24.57 | 0.85 | 52.08 | 51:1 | 2.06 |
| SDP1 | 28.52 | 1.07 | 49.92 | 60:1 | 2.75 |

### Upregulation of Genes Involved in Photosynthesis

[1141] The observations described above on the increase in carbon and energy contents in the transgenic plants led the inventors to consider whether the plants might exhibit an increase in photosynthetic capacity, related to the altered carbon allocation between starch and TAG. Therefore, the transcriptome of the HO plants was determined and compared to the transcriptome from WT plants grown under the same conditions. RNA was isolated from plants at the flowering stage, converted to cDNA and the full transcriptomes were determined. When the resultant sequence libraries were compared for the frequency of representation of individual genes, numerous genes involved in photosynthesis were observed to be up-regulated (over-expressed) in the HO plants. Table 10 lists representative genes which were up-regulated. From this, it was concluded that the capacity for photosynthesis was increased in the transgenic plants.

TABLE 10
Listing of genes related to photosynthesis and whose expression was up-regulated.

| Unigene | log2FC | logCPM | LR | PValue | Arabidopsis Annotation | Nicotiana Annotation |
|---|---|---|---|---|---|---|
| c72304_g2_i2 | 1.03 | 6.31 | 14.04 | 0.000179411 | PSBP-2 photosystem II subunit P-2 | PREDICTED: Oxygen-evolving enhancer protein 2-1, chloroplastic |
| | | | | | chr2: 13118937-13120090 | (LOC104217148) |
| c63827_g1_i2 | 2.31 | 0.95 | 21.08 | 4.40E−06 | NA | PREDICTED: PsbQ-like protein 1, chloroplastic (LOC104213138) |
| | | | | | | variant X1 |
| c72304_g2_i6 | 1.19 | 2.43 | 15.20 | 9.66E−05 | PSBP-1, OEE2, PSII-P, OE23 photosystem II | PREDICTED: Oxygen-evolving enhancer protein 2-2, chloroplastic |
| | | | | | subunit P-1 chr1: 2047825-2049418 | (LOC104220111) |
| c72995_g1_i1 | 3.02 | 3.42 | 101.49 | 7.18E−24 | NA | PREDICTED: Ferredoxin, root R-B1-like (LOC104250181), transcript variant X2 |
| c66865_g1_i2_1 | 1.30 | 2.69 | 12.05 | 0.000518939 | NA | PREDICTED: Photosystem II repair protein PSB27-H1, chloroplastic (LOC104235950) |
| c64448_g1_i1_1 | 1.06 | 8.91 | 13.35 | 0.000258132 | NA | PREDICTED: Ferredoxin (LOC104243179), Mrna |
| c65326_g1_i1 | 1.17 | 8.45 | 20.85 | 4.97E−06 | NA | PREDICTED: Oxygen-evolving enhancer protein 3-2, (LOC104238927) |
| c68151_g1_i1 | 0.78 | 8.00 | 9.37 | 0.002201414 | PSAF photosystem I subunit F chr1: 11214824-11216037 | PREDICTED: Photosystem I reaction center subunit III, (LOC104229855) |
| c70874_g1_i3 | 0.77 | 6.00 | 11.61 | 0.000655078 | PSAF photosystem I subunit F chr1: 11214824-11216037 | PREDICTED: Photosystem I reaction center subunit III, LOC104227234) |
| c72380_g2_i1 | 0.82 | 8.81 | 15.30 | 9.19E−05 | ATPC1 ATPase, F1 complex, gamma subunit | PREDICTED: ATP synthase gamma chain, chloroplastic (LOC104212794) |
| | | | | | protein chr4: 2350498-2352018 | |
| c84022_g2_i1 | 1.25 | 6.54 | 19.65 | 9.29E−06 | NA | PREDICTED: Plastocyanin A′/A″ (LOC104226609) |
| c80197_g1_i1_1 | 0.66 | 6.27 | 9.60 | 0.00194393 | PSBO-1, OEE1, OEE33, OE33, PSBO1, MSP-1 | PREDICTED: Oxygen-evolving enhancer protein 1, chloroplastic (LOC104219516) |
| | | | | | PS II oxygen-evolving complex 1 | |
| c80359_g2_i3 | 0.74 | 6.41 | 8.91 | 0.002843257 | PSBP-2photosystem II subunit P-2 | PREDICTED: oxygen-evolving enhancer protein 2-2, (LOC104220111), variant X2 |
| | | | | | chr2: 13118937-13120090 | |
| c84616_g2_i1 | 0.95 | 8.53 | 13.93 | 0.000189474 | NA | PREDICTED: Oxygen-evolving enhancer protein 3-2, chloroplastic-like (LOC104238927) |
| c60857_g1_i2_1 | 2.13 | 2.76 | 61.06 | 5.54E−15 | NA | PREDICTED: Ferredoxin, root R-B2-like (LOC104216941), transcript variant X1 |
| c66431_g3_i1 | 2.04 | 1.10 | 26.67 | 2.41E−07 | NA | PREDICTED: Plastocyanin (LOC104222137), mRNA |
| c70844_g1_i1 | 0.72 | 8.77 | 10.45 | 0.001227902 | PSBO-1, OEE1, OEE33, OE33, PSBO1, MSP-1 | PREDICTED: Oxygen-evolving enhancer protein 1, chloroplastic (LOC104219516), mRNA |
| | | | | | PS II oxygen-evolving complex 1 | |
| | | | | | chr5: 26568653-26570278 | |
| c72588_g1_i1_1 | 0.58 | 9.38 | 8.50 | 0.003545489 | NA | PREDICTED: Photosystem I reaction center subunit XI, chloroplastic |
| | | | | | | (LOC104221829) |
| c63567_g3_i1 | 0.96 | 8.50 | 15.81 | 7.01E−05 | PSAO photosystem I subunit O chr1: 2640813-2641828 | PREDICTED: Photosystem I subunit O-like (LOC104237017), transcript variant X1 |
| c79260_g1_i1 | 1.76 | 6.42 | 68.73 | 1.13E−16 | PSBO-1, OEE1, OEE33, OE33, PSBO1, MSP-1 | PREDICTED: Oxygen-evolving enhancer protein 1, chloroplastic-like |
| | | | | | PS II oxygen-evolving complex 1 | (LOC104210963), mRNA |
| | | | | | chr5: 26568653-26570278 | |
| c70844_g1_i5 | 1.16 | 6.10 | 24.55 | 7.23E−07 | PSBO2, PSBO-2, OEC33 photosystem II | PREDICTED: Oxygen-evolving enhancer protein 1, (LOC104210963) |
| | | | | | subunit O-2 chr3: 18890876-18892426 | |
| c72502_g1_i1 | 0.86 | 4.19 | 12.14 | 0.000493881 | NA | PREDICTED: Oxygen-evolving enhancer protein 1, (LOC104210963) |
| c79863_g1_i3_1 | 1.26 | 2.23 | 13.31 | 0.000263854 | NA | PREDICTED: Plastocyanin A′/A″ (LOC104226609) |
| c72380_g1_i1_2 | 0.85 | 8.57 | 20.42 | 6.23E−06 | ATPC1 ATPase, F1 complex, gamma subunit | PREDICTED: ATP synthase gamma chain, chloroplastic (LOC104212794) |
| | | | | | protein chr4: 2350498-2352018 | |
| c66717_g2_i2 | 0.61 | 10.76 | 10.67 | 0.001090419 | NA | PREDICTED: Photosystem II 10 kDa polypeptide, chloroplastic |
| | | | | | | (LOC104224572) |
| c60043_g4_i1 | 3.40 | 1.72 | 78.26 | 9.04E−19 | NA | PREDICTED: Ferredoxin, root R-B2-like (LOC104216941), |
| | | | | | | transcript variant X1 |
| c64427_g1_i1_1 | 0.70 | 9.07 | 8.59 | 0.003381803 | NA | PREDICTED: Photosystem II reaction center W protein, (LOC104244017) |

### Effects of Modifying Photoperiod and Light Intensity

[1142] The growth conditions were modified compared to those described above, in order to test the effect of increasing or decreasing the photoperiod from the 12 hrs, and of increasing light intensity. In one growth chamber using high light intensity and long photoperiod, the CO₂ concentration was also increased above the ambient. The following conditions were tested, in each case plants were grown in PGC20/PGC20FLEX plant growth cabinets (Conviron) at 25° C. during the light period, 20° C. during the dark period and leaf samples were harvested at seed-setting stage of growth from leaf Nos. 9, 15 and 20 counting from the bottom of each plant. Leaf 9 was therefore the oldest of the sampled leaves, leaf 15 intermediate, and leaf 20 the youngest leaf sampled. Leafs were assayed for total fatty acid (TFA) content as described in Example 1.
[1143] 1. Control conditions: 8 plants were grown with 300 μmol m⁻² s⁻¹ illumination from fluorescent bulbs, with a 12-hour photoperiod;
[1144] 2. Increased light intensity: 7 plants were grown with 700 μmol m² s⁻¹ illumination from fluorescent bulbs, with a 12-hour photoperiod;
[1145] 3. Reduced photoperiod: 9 plants were grown with 700 mol m⁻² s⁻¹ illumination from fluorescent bulbs, with a 8-hour photoperiod;
[1146] 4. Increased light intensity and photoperiod: 10 plants were grown with 700 μmol m⁻² s⁻¹ illumination from fluorescent bulbs, with a 12-hour photoperiod, at 700 ppm CO₂ concentration.

[1147] The average data for leaves 9, 15 and 20 of each genotype are plotted in FIG. 11. Increased light intensity alone did not significantly affect the TFA levels. Decreasing the photoperiod from 12 hrs to 8 hrs decreased the levels of TFA but to a surprisingly small extent. That is, even reducing the amount of light received each 24 hours by 33% had remarkably small effect. The most dramatic results observed were from the test using an increased photoperiod under increased light intensity and increased CO₂ concentration. The TFA levels increased dramatically, reaching 50% (w/w dry weight) and above in leaves of the LEC2 plants. Since the TFA assays measured only the fatty acid components of lipids, this meant that the total lipid level was even higher in these leaves.

### Example 5. Modifying Traits in Vegetative Parts of Monocotyledonous Plants

[1148] Chimeric DNA constructs were designed to increase oil content in monocotyledonous plants, for example the C4 plant S. bicolor (sorghum), by expressing a combination of genes encoding WRI1, Z. mays LEC1 (Accession number AAK95562; SEQ ID NO:155), DGAT and Oleosin in the transgenic plants. Several pairs of constructs for biolistic co-transformation were designed and produced by restriction enzyme-ligation cloning, as follows.

[1149] The genetic construct pOIL136 was a binary vector containing three monocot expression cassettes, namely a selectable marker gene encoding phosphinothricin acetyltransferase (PAT) for plant selection, a second cassette for expressing DGAT and a third for expressing Oleosin. pJP136 was first produced by amplifying an actin gene promoter from Oryza sativa (McElroy et al., 1990) and inserting it as a blunt-ClaI fragment into pORE04 (Coutu et al., 2007) to produce pOIL094. pOIL095 was then produced by inserting a version of the Sesamum indicum Oleosin gene which had been codon optimised for monocot expression into pOIL094 at the KpnI site. pOIL093 was produced by cloning a monocot codon optimised version of the Umbelopsis ramanniana DGAT2a gene (Lardizabal et al., 2008) as a SmaI-KpnI fragment into a vector already containing a Zea mays Ubiquitin gene promoter. pOIL134 was then produced by cloning the NotI DGAT2a expression cassette from pOIL093 into pOIL095 at the NotI sites. pOIL141 was produced by inserting the selectable marker gene coding for PAT as a Band-II-SacI fragment into a vector containing the Z. mays Ubiquitin promoter. Finally, pOIL136 was produced by cloning the Z. mays Ubiquitin::PAT expression cassette as a blunt-AscI fragment into the ZraI-AscI of pOIL096. The genetic construct pOIL136 therefore contained the following expression cassettes: promoter O. sativa Actin::S. indicum Oleosin, promoter Z. mays Ubiquitin:: U. ramanniana DGAT2a and promoter Z. mays Ubiquitin::PAT.

[1150] A similar vector pOIL197, containing NPTII instead of PAT was constructed by subcloning of the Z. mays Ubiquitin::NPTII cassette from pUKN as a HindIII-SmaI fragment into the AscI (blunted) and HindIII sites of pJP3343. The resulting vector, pOIL196, was then digested with HindIII (blunted) and AgeI. The resulting 3358 bp fragment was cloned into the ZraI—AgeI sites of pOIL134, yielding pOIL197.

[1151] A set of constructs containing genes encoding the Z. mays WRI1 (ZmWRI) or the LEC1 (ZmLEC1) transcription factors under the control of different promoters were designed and produced for biolistic co-transformation in combination with pOIL136 or pOIL197 to test the effect of promoter strength and cell specificity on the function of WRI1 or LEC1, or both if combined, when expressed in vegetative tissues of a C4 plant such as sorghum. This separate set of constructs did not contain a selectable marker gene, except for pOIL333 which contained NPTII as selectable marker. The different promoters tested were as follows. The Z. mays Ubiquitin gene promoter (pZmUbi) was a strong constitutive monocot promoter while the enhanced CaMV 35S promoter (e35S) having a duplicated enhancer region was reported to result in lower transgene expression levels (reviewed in Girijashankar and Swathisree, 2009). Whilst the Z. mays phosphoenolpyruvate carboxylase (pZmPEPC) gene promoter was active in leaf mesophyl cells (Matsuoka and Minami, 1989), the site of photosynthesis in C4 plant species, the Z. mays Rubisco small subunit (pZmSSU) gene promoter was specific for the bundle sheath cell layer (Nomura et al., 2000; Lebrun et al., 1987), the cells where carbon fixation takes place in C4 plants.

[1152] The expression of the Z. mays gene encoding the SEE1 cysteine protease (Accession number AJ494982) was identified as similar to that of the A. thaliana SAG12 senescence-specific promoter during plant development. Therefore a 1970 bp promoter from the SEE1 gene (SEQ ID NO:207) was also selected to drive expression of the genes encoding the Z. mays WRI1 and LEC1 transcription factors. Further, the promoter from the gene encoding Aeluropus littoralis zinc finger protein AlSAP (Ben Saad et al., 2011; Accession number DQ885219; SEQ ID NO:208), the promoter from the gene encoding the Saccharum hybrid DIRIGENT (DIR16) (Damaj et al., 2010; Accession number GU062718; SEQ ID NO:246), the promoter from the gene encoding the Saccharum hybrid O-Methyl transferase (OMT) (Damaj et al., 2010; Accession number GU062719; SEQ ID NO:247), the A1 promoter allel from the gene encoding the Saccharum hybrid R1MYB1 (Mudge et al., 2009; Accession number JX514703.1; SEQ ID NO:248), the promoter from the gene encoding the Saccharum hybrid Loading Stem Gene 5 (LSG5) (Moyle and Birch, 2013; Accession number JX514698.1; SEQ ID NO:249) and the promoter from the sucrose-responsive ArRolC gene from A. rhizogenes (Yokoyama et al., 1994; Accession number DQ160187; SEQ ID NO:209) were also selected for expression of ZmWRI1 expression in stem tissue. Therefore, each of these promoters was individually joined upstream of the ZmWRI1 or ZmLEC1 coding regions, as follows.

[1153] An intermediate vector, pOIL100, was first produced by cloning the Z. mays WRI1 coding sequence and a transcription terminator/polyadenylation region, flanked by AscI-NcoI sites, into the same sites in the binary vector pJP3343. The different versions of the constructs for WRI1 expression were based on this vector and were produced by cloning the various promoters into pOIL100. pOIL101 was produced by cloning a XhoI-SalI fragment containing the e35S promoter with duplicated enhancer region into the XhoI site of pOIL100. pOIL102 was produced by cloning a HindIII-AvrII fragment containing the Z. mays Ubiquitin gene promoter into the HindIII-XbaI sites of pOIL100. pOIL103 was produced by cloning a HindIII-NcoI fragment containing a Z. mays PEPC gene promoter into the HindIII-NcoI sites of pOIL100. pOIL104 was produced by cloning a HindIII-AvrII fragment containing a Z. mays SSU gene promoter into the HindIII-AvrII sites of pOIL100.

[1154] A synthetic fragment containing the Z. mays SEE1 promoter region flanked by HindIII-XhoI unique sites was synthesized. This fragment was cloned upstream of the Z. mays WRI1 protein coding region using the HindIII-XhoI sites in pOIL100. The resulting vector was designated pOIL329. A synthetic fragment containing the A. littoralis A1SAP promoter region flanked by XhoI-XbaI unique sites was synthesized. This fragment was cloned upstream of the Z. mays WRI1 coding region using the XbaI-XhoI sites in pOIL100. The resulting vector was designated pOIL330. A synthetic fragment containing the A. rhizogenes ArRolC promoter region flanked by PspOMI-XhoI unique sites was synthesized. This fragment was cloned upstream of the Z. mays WRI1 coding region using the PspOMI-XhoI sites in pOIL100. The resulting vector was designated pOIL335. Finally, a binary vector (pOIL333) containing the Z. mays SEE1::ZmLEC1 expression cassette was obtained in three steps. First, a 35S::GUS expression vector was constructed by amplifying the GUS coding region with flanking primers containing AvrII and KpnI sites. The resulting fragment was subsequently cloned into the SpeI-KpnI sites of pJP3343. The resulting vector was designated pTV111. Next, the 35S promoter region of pTV111 was replaced by the Z. mays SEE1 promoter. To this end, the Z. mays SEE1 sequence was amplified using flanking primers containing HindIII and XhoI unique sites. The resulting fragment was cut with the respective restriction enzymes and subcloned into the SalI-HindIII sites of pTV111. The resulting vector was designated pOIL332. Next the ZmLEC1 coding sequence was amplified using flanking primers containing Nod and EcoRV sites. This resulting fragment was subcloned into the respective sites of pOIL332, yielding pOIL333.

[1155] A 2673 bp synthetic fragment containing the Saccharum DIR16 promoter region flanked by HindIII-XbaI sites was synthesized. This fragment was cloned upstream of the Z. mays WRI1 protein coding region using the HindIII-XbaI sites in pOIL100. The resulting vector was designated pOIL337. A 2947 bp synthetic fragment containing the Saccharum OMT promoter region flanked by XhoI-XbaI sites was synthesized. This fragment was cloned upstream of the Z. mays WRI1 protein coding region using the XhoI-XbaI sites in pOIL100. The resulting vector was designated pOIL339. A 1181 bp synthetic fragment containing the Saccharum R1MYB1 promoter region flanked by HindIII-XhoI sites was synthesized. This fragment was cloned upstream of the Z. mays WRI1 protein coding region using the HindIII-XhoI sites in pOIL100. The resulting vector was designated pOIL341. A 4482 bp synthetic fragment containing the Saccharum LSG5 promoter region flanked by XbaIII-SmaI sites was synthesized. This fragment was cloned as an XbaIII-SmaI fragment upstream of the Z. mays WRI1 protein coding region using the StuI-NheI sites in pOIL100. The resulting vector was designated pOIL343.

[1156] Whole plasmid DNA was prepared from pOIL101, pOIL102, pOIL103, pOIL104, pOIL197 and pOIL136 for biolistic transformation. pOIL197 DNA was then mixed with either pOIL101, pOIL102, pOIL103 or pOIL104 and transformed by biolistic-mediated transformation into S. bicolor (grain sorghum TX430) differentiating embryonic calli (DEC) tissues as described in Example 1. Alternatively, constructs for expression of the same combinations of genes are transformed separately or co-transformed by Agrobacterium-mediated transformation (Gurel et al., 2009; Wu et al., 2014) into DEC tissues.

[1157] Twenty-five to fifty transgenic plants were regenerated and selected by antibiotic resistance for the pairs of constructs including pOIL197 with each of pOIL102 (pZmUbi::WRI1), pOIL103 (pZmPEPC::WRI1) and pOIL104 (pSSU::WRI1). Transformations were also carried out with pOIL197 alone and with pOIL102 or pOIL103 alone, and for an “empty vector” control. The presence of the desired transgenes in plants that were resistant to the selective agent was demonstrated by PCR. The copy number of each transgene was also determined by digital PCR.

[1158] Total leaf lipids were quantified in a first subset of transgenic S. bicolor plants prior to their transfer from MS medium to soil. This preliminary screening suggested slightly elevated total lipid levels in leaf tissue of some events at this very early stage. The line with the highest total lipid content, pOIL136 (2), was further analyzed by thin layer chromatography (TLC) to determine the effect of transgene expression on TAG accumulation. Leaf tissue of this particular line was sampled at vegetative stage following transfer to soil in the glasshouse. When compared to the wildtype and empty vector negative controls, pOIL136 (2) exhibited increased TAG levels in leaf tissue after TLC separation and iodine staining. Subsequent quantification revealed 10-fold increased TAG in the transgenic line compared to the negative controls. The TAG profile was dominated by the polyunsaturated fatty acids linoleic and α-linolenic acid.

[1159] After confirmed transgenic plants were transferred to soil in pots in the glasshouse, whole leaves were sampled from primary transformants at vegetative stage of growth (i.e. prior to the appearance of the boot leaf), at the boot leaf stage (defined as when the boot leaf has fully emerged, the boot leaf is the last leaf formed on the plant and from which the panicle (head) emerges) and at the mature seed-setting stage. Total fatty acid (TFA) and triacylglycerol (TAG) contents (% leaf dry weight) were quantified by TLC-GC as described in Example 1.

[1160] TFA levels in wildtype and empty vector negative controls decreased during plant development (Table 11) and were in the range 0.7-3.3% (weight/dry weight). The highest TFA levels were detected prior to the appearance of the boot leaf (termed the vegetative stage of growth) and were not higher than 3.3%. TAG levels in the same plants were consistently low in the range 0-0.2% during the entire plant life cycle (Table 11). Both the TFA content and the TAG content had fatty acid compositions of predominantly C16:0, C18:2^{Δ9,12} (LA) and C18:3^{Δ9,12,15} (ALA). In particular, ALA was present at about 50-75% of the TFA content, reflecting the use of this fatty acid in wild-type plastid membranes. ALA also was the main fatty acid in the very small amount of TAG present in the wild-type leaves.

[1161] Thirty-five confirmed transgenic plants which had been transformed with pOIL197 or pOIL136, each vectors comprising both pZmUbi:DGAT and pZmUbi:Oleosin genes in addition to the selectable marker genes, were analysed at the vegetative, boot leaf and mature seed setting stages. The data are presented in Tables 12-14. Generally, the pOIL197 and pOIL136 primary transformants displayed increased TFA and TAG accumulation compared to the negative control lines, but only to about double for the TFA level compared to the controls. The highest TFA levels were detected at the vegetative stage of growth (Table 12). Similar to the wild-type and negative control lines, TFA levels decreased with progressing plant age (Tables 13 and 14). Maximum TFA levels at vegetative, boot leaf and mature seed setting stages equalled 5%, 4.5% and 2.1%, respectively. The highest TAG levels detected varied between 0.9 and 1.9% depending on the age of the plant at the time of sampling (Table 13), so were increased up to 10-fold relative to the very low levels in the wild-type leaves (Table 11). The TFA composition remained largely unchanged at the different stages and was dominated by ALA. The TAG composition displayed a higher degree of variation between the different transgenic lines. Compared to the fatty acid composition of the TFA content, the levels of stearic acid, oleic acid and LA (18:2^{Δ9,12}) consistently increased in TAG throughout all plant stages investigated.

[1162] Nine primary transgenic plants made by transformation with pOIL102 (pZmUbi:WRI1) were generated by co-bombardment of pOIL102 and pUKN, containing the NPTII selectable marker gene. Tables 15-17 show the data for TFA and TAG contents and fatty acid compositions were measured at the three growth stages. When compared to the plants transformed with the constructs encoding DGAT2 and Oleosin (pOIL197 or pOIL136), TFA and TAG levels in the pOIL102 transgenic events were generally lower. Indeed, levels of TFA and TAG were similar to the levels in the wild-type and negative control plants. Maximum TFA levels at vegetative, boot leaf and mature seed setting stages were 2.6%, 2.5% and 2.0%, respectively (Tables 15-17). Maximum TAG levels observed were 0.2%, 0.4% and 0.9% at vegetative, boot leaf and mature seed setting stages, respectively.

[1163] Thirty-six primary transgenic plants made by co-bombardment with both pOIL197 (pZmUbi:DGAT and pZmUbi:Oleosin) and pOIL102 (pZmUbi:WRI1) and confirmed to have integrated both genetic constructs were analysed for TFA and TAG contents and fatty acid composition at the three growth stages. The data are presented in Tables 18-20. Some of the plants exhibited greatly increased TFA and TAG levels compared to the transformations with single pOIL197, pOIL136 or pOIL102 vectors. Maximum TFA levels at vegetative, boot leaf and mature seed setting stages in the pOIL102+pOIL197 population equalled 7.2%, 6.4% and 6.1%, respectively (Tables 18-20). Importantly, the maximum observed TAG levels increased during plant development from 2.7% (vegetative stage) to 3.5% (boot leaf stage) and 4.3% (mature seed setting stage) (Tables 18-20). Compared with the data obtained for the separate transformations with the DGAT and WRI1 transgenes, this exemplified the synergism for co-expressing DGAT and WRI1 transgenes to increase non-polar lipid accumulation in vegetative plant tissues. High levels of TAG and TFA were in most cases associated with a substantial reduction in the C18:3^{Δ9,12,15} content, which was reduced by about 50% in the lines with the highest levels of TAG.

[1164] Thirty-six primary transformants containing both pOIL197 (pZmUbi:DGAT and pZmUbi:Oleosin) and pOIL103 (pZmPEPC:WRI1) were analysed for TFA and TAG contents and fatty acid composition during the three stages of plant development. The data are presented in Tables 21-23. Some plants with this gene combination exhibited the highest TFA and TAG levels detected in this experimental series. TFA levels were observed at vegetative, boot leaf and mature seed setting stages in the pOIL103+pOIL197 population at 8.3%, 8.3% and 4.5%, respectively (Tables 21-23). TAG levels were observed at vegetative, boot leaf and mature seed setting stages at 2.3%, 6.6% and 3.0%, respectively (Tables 21-23). Of note, the highest TAG (6.6%) and TFA (8.3%) levels amongst all transgenic lines were detected in event TX-03-31 at boot leaf stage. While C18:3^{Δ9,12,15} typically dominated the TFA fraction, TAG compositions in this population displayed a high degree of variability. Of note, some events exhibited increases in levels of palmitic acid (C16:0) and/or linoleic acid (LA, C18:2^{Δ9,12}) at the expense of ALA. Indeed, the ALA level in both TFA and TAG contents was reduced below 40% in some events, less than 30% in selected events. The ALA level in TAG was less than 20% in some selected events.

[1165] Sixteen primary transformants containing both pOIL197 (pZmUbi:DGAT and pZmUbi:Oleosin) and pOIL104 (pSSU:WRI1) were analysed for TFA and TAG contents and fatty acid composition. Leaves of primary transformants containing both pOIL197 and pOIL104 T-DNA regions, sampled at vegetative stage of growth were observed with 4.1% and 5.9% TFA (Table 24). Surprisingly, the highest TFA levels detected in this population were accompanied by a relatively low TAG content. TAG levels in pOIL104+pOIL197 transgenic plants at vegetative and boot leaf stages reached only to 0.6% and 2.8%. Increased TAG levels were typically associated with a reduction in C18:3^{Δ9,12,15} and an increase in both palmitic acid and LA.

[1166] The TFA and TAG levels in many independent transformed plants are shown schematically in FIG. 19.

[1167] Perhaps the most surprising and unexpected conclusion drawn from the large amount of data in this Example was the relatively high level of TFA accompanied by the low levels of TAG, except in a few exceptional plants such as plant TX-03-31 (Table 22). That is, although substantially much increased fatty acid synthesis was occurring, much of the increased fatty acid was not appearing as TAG. This conclusion was completely the opposite of what had been observed with the WRI1+DGAT transgenic plants for Nicotiana including tobacco. To quantitate this in the sorghum plants, the quotient of the TAG to TFA level was calculated for all of the above mentioned transgenic sorghum populations (Tables 11-24). The TAG/TFA Quotient (TTQ) parameter was calculated as the level of TAG (%) divided by the level of TFA (%), each as a percentage of the dry weight of the plant material (leaf in this case). It was observed that for many of the sorghum lines, the TTQ was in the range of 0.01 to 0.6. Addition of one or more further genetic modifications to the plants which provide for a reduction in the level of SDP1, TGD or TST, or an increase in the levels of one or more of PDAT, PDCT or CPT polypeptides increases the TTQ to above 0.6 for a larger proportion of the plant lines. In particular, reduction in TAG lipase in the plants increases the TTQ to up to 0.95.

[1168] Due to the large difference in absolute TFA and TAG levels in many transgenic lines, the inventors selected two pOIL102+pOIL197 events for quantification of the major neutral and polar lipid classes, to determine the type of lipid in which the high level of fatty acids was present. The types of lipid were separated by TLC and quantitated. At the vegetative stage of growth, TX-02-8 and TX-02-19 contained 4.5% and 7.2% TFA, respectively (Table 18). TAG content was only slightly increased in the TX-02-8 leaves while the levels of phosphatidylcholine (PC, a phospholipid) and the galactolipid MGDG were comparable to the negative controls. TX-02-19 exhibited increased TAG, PC and MGDG levels, indicating an increase in both neutral and polar lipid classes.

TABLE 11
TFA and TAG levels, fatty acid composition and TTQ in wild-type (WT)
and empty vector (EV) negative controls during different stages of plant development.

| | | TAG or | | | | | | | | | |
|---|---|---|---|---|---|---|---|---|---|---|---|
| Stage | Line | TFA | C16:0 | C18:0 | C18:1 | C18:2 | C18:3 | Other | TFA | TAG | TTQ |
| Veg | WT1 | TFA | 9.9 | 1.2 | 0.7 | 8.8 | 75.4 | 4.0 | 1.7 | | |
| Veg | WT1 | TAG | 22.5 | 3.6 | 3.0 | 31.8 | 37.4 | 1.6 | | 0.0 | 0.027 |
| Veg | WT2 | TFA | 12.0 | 1.7 | 0.7 | 8.5 | 73.0 | 4.2 | 2.2 | | |
| Veg | WT2 | TAG | 12.1 | 3.2 | 2.1 | 29.0 | 52.3 | 1.4 | | 0.1 | 0.028 |
| Veg | WT3 | TFA | 15.3 | 1.5 | 0.7 | 10.0 | 69.8 | 2.7 | 2.7 | | |
| Veg | WT3 | TAG | 17.4 | 6.5 | 2.6 | 27.2 | 38.0 | 8.3 | | 0.0 | 0.000 |
| Veg | WT6 | TFA | 12.2 | 1.8 | 0.5 | 7.7 | 72.8 | 5.1 | 3.3 | | |
| Veg | WT6 | TAG | 18.8 | 6.8 | 3.7 | 17.4 | 44.7 | 8.5 | | 0.1 | 0.017 |
| Veg | EV1 | TFA | 13.0 | 2.1 | 0.9 | 9.6 | 70.6 | 3.8 | 2.0 | | |
| Veg | EV1 | TAG | 6.5 | 2.8 | 1.6 | 19.2 | 51.4 | 18.5 | | 0.2 | 0.090 |
| Veg | EV3 | TFA | 12.1 | 1.9 | 0.9 | 9.4 | 72.7 | 3.0 | 2.1 | | |
| Veg | EV3 | TAG | 9.7 | 3.8 | 2.3 | 25.1 | 57.6 | 1.6 | | 0.1 | 0.056 |
| BL | EV1 | TFA | 17.6 | 1.9 | 1.5 | 14.7 | 59.0 | 5.4 | 1.5 | | |
| BL | EV1 | TAG | 17.5 | 6.5 | 3.7 | 30.7 | 35.6 | 5.9 | | 0.0 | 0.031 |
| BL | WT3 | TFA | 14.4 | 3.9 | 2.4 | 11.1 | 62.6 | 5.6 | 1.1 | | |
| BL | WT3 | TAG | 9.4 | 4.8 | 4.0 | 19.1 | 61.2 | 1.6 | | 0.2 | 0.153 |
| MSS | WT3 | TFA | 14.2 | 3.9 | 2.2 | 10.2 | 63.6 | 5.9 | 1.2 | | |
| MSS | WT3 | TAG | 15.3 | 12.5 | 3.9 | 18.2 | 43.9 | 6.2 | | 0.1 | 0.067 |
| MSS | EV3 | TFA | 16.5 | 5.0 | 1.6 | 12.7 | 50.6 | 13.6 | 0.7 | | |
| MSS | EV3 | TAG | 13.4 | 11.4 | 2.6 | 19.6 | 50.0 | 3.0 | | 0.1 | 0.192 |

Veg: Vegetative;
BL, Boot leaf stage of growth;
MSS, Mature seed setting stage

TABLE 12
TFA and TAG levels, fatty acid composition and TTQ in sorghum leaves
transformed with pOIL197 or pOIL136 (pZmUbi:DGAT; pZmUbi:Oleosin) during the
vegetative stage of growth. The lines are listed in order of increasing TFA levels.

| | TAG or | | | | | | | | | |
|---|---|---|---|---|---|---|---|---|---|---|
| Line | TFA | C16:0 | C18:0 | C18:1 | C18:2 | C18:3n3 | Other | TFA | TAG | TTQ |
| TX-197-18 | TFA | 16.3 | 3.7 | 1.7 | 13.3 | 59.7 | 5.3 | 0.7 | | |
| TX-197-18 | TAG | 13.9 | 5.0 | 2.7 | 22.2 | 53.0 | 3.3 | | 0.1 | 0.188 |
| TX-197-12 | TFA | 15.4 | 2.5 | 1.6 | 13.8 | 56.7 | 10.0 | 1.0 | | |
| TX-197-12 | TAG | 12.6 | 4.0 | 3.5 | 28.6 | 47.8 | 3.4 | | 0.1 | 0.106 |
| TX-197-04 | TFA | 12.8 | 3.7 | 1.5 | 9.2 | 65.4 | 7.4 | 1.2 | | |
| TX-197-04 | TAG | 8.0 | 5.0 | 3.1 | 16.6 | 65.3 | 2.1 | | 0.2 | 0.169 |
| TX-136-03 | TFA | 13.9 | 2.2 | 2.0 | 11.7 | 65.5 | 4.8 | 1.2 | | |
| TX-136-03 | TAG | 12.1 | 3.8 | 4.2 | 27.8 | 50.5 | 1.6 | | 0.1 | 0.064 |
| TX-197-06 | TFA | 13.8 | 2.7 | 1.7 | 10.9 | 63.3 | 7.5 | 1.2 | | |
| TX-197-06 | TAG | 9.8 | 4.0 | 3.5 | 22.6 | 56.6 | 3.4 | | 0.1 | 0.107 |
| TX-197-20 | TFA | 15.3 | 2.6 | 1.5 | 12.1 | 61.4 | 7.2 | 1.2 | | |
| TX-197-20 | TAG | 13.5 | 4.2 | 3.3 | 25.5 | 50.3 | 3.1 | | 0.1 | 0.085 |
| TX-136-24 | TFA | 12.2 | 2.0 | 1.6 | 10.9 | 69.0 | 4.3 | 1.5 | | |
| TX-136-24 | TAG | 11.7 | 3.3 | 3.0 | 23.3 | 55.9 | 2.8 | | 0.4 | 0.243 |
| TX-197-16 | TFA | 14.4 | 2.2 | 1.7 | 13.5 | 61.1 | 7.2 | 1.9 | | |
| TX-197-16 | TAG | 14.8 | 3.5 | 3.2 | 25.3 | 47.9 | 5.3 | | 0.4 | 0.235 |
| TX-197-05 | TFA | 12.2 | 2.3 | 1.3 | 9.9 | 68.2 | 6.1 | 2.0 | | |
| TX-197-05 | TAG | 10.4 | 4.3 | 2.9 | 21.0 | 58.7 | 2.7 | | 0.1 | 0.070 |
| TX-197-17 | TFA | 14.0 | 2.2 | 2.4 | 19.5 | 55.4 | 6.5 | 2.1 | | |
| TX-197-17 | TAG | 13.7 | 3.3 | 4.4 | 33.8 | 40.4 | 4.4 | | 0.6 | 0.264 |
| TX-197-22 | TFA | 11.9 | 1.7 | 0.9 | 8.5 | 71.6 | 5.4 | 2.1 | | |
| TX-197-22 | TAG | 11.5 | 4.3 | 2.4 | 23.9 | 55.2 | 2.8 | | 0.1 | 0.041 |
| TX-197-21 | TFA | 10.8 | 1.6 | 0.9 | 7.9 | 73.3 | 5.5 | 2.4 | | |
| TX-197-21 | TAG | 9.9 | 3.8 | 2.6 | 24.2 | 57.0 | 2.5 | | 0.1 | 0.045 |
| TX-197-10 | TFA | 10.5 | 1.5 | 0.8 | 9.3 | 72.8 | 5.2 | 2.7 | | |
| TX-197-10 | TAG | 9.0 | 2.8 | 2.4 | 26.6 | 55.6 | 3.7 | | 0.2 | 0.078 |
| TX-197-50 | TFA | 12.9 | 1.8 | 1.0 | 10.8 | 68.1 | 5.3 | 2.8 | | |
| TX-197-50 | TAG | 14.7 | 4.4 | 2.5 | 23.1 | 48.8 | 6.6 | | 0.3 | 0.107 |
| TX-197-07 | TFA | 10.5 | 1.4 | 0.8 | 10.1 | 71.8 | 5.4 | 2.8 | | |
| TX-197-07 | TAG | 9.6 | 2.9 | 2.5 | 31.3 | 49.6 | 4.1 | | 0.2 | 0.067 |
| TX-197-48 | TFA | 13.2 | 1.8 | 1.2 | 11.4 | 67.0 | 5.4 | 2.8 | | |
| TX-197-48 | TAG | 10.1 | 3.1 | 2.5 | 25.5 | 53.1 | 5.6 | | 0.3 | 0.104 |
| TX-197-08 | TFA | 11.4 | 1.1 | 1.4 | 12.4 | 68.1 | 5.6 | 2.9 | | |
| TX-197-08 | TAG | 15.9 | 3.7 | 6.1 | 45.2 | 23.2 | 5.8 | | 0.1 | 0.027 |
| TX-197-13 | TFA | 10.8 | 1.6 | 0.7 | 8.0 | 73.5 | 5.4 | 2.9 | | |
| TX-197-13 | TAG | 10.5 | 3.6 | 2.2 | 24.1 | 51.2 | 8.4 | | 0.1 | 0.037 |
| TX-197-15 | TFA | 10.5 | 1.3 | 0.7 | 8.9 | 73.0 | 5.6 | 2.9 | | |
| TX-197-15 | TAG | 9.6 | 2.8 | 2.2 | 26.9 | 55.3 | 3.3 | | 0.2 | 0.067 |
| TX-136-02 | TFA | 12.5 | 1.5 | 1.3 | 14.3 | 66.1 | 4.3 | 2.9 | | |
| TX-136-02 | TAG | 14.0 | 2.6 | 2.7 | 27.3 | 48.4 | 5.0 | | 0.7 | 0.245 |
| TX-197-19 | TFA | 10.9 | 1.4 | 0.8 | 9.1 | 73.0 | 4.8 | 3.1 | | |
| TX-197-19 | TAG | 11.1 | 3.0 | 2.3 | 27.3 | 52.6 | 3.6 | | 0.2 | 0.063 |
| TX-197-40 | TFA | 9.9 | 1.1 | 0.5 | 8.2 | 77.4 | 3.0 | 3.1 | | |
| TX-197-40 | TAG | 15.4 | 6.3 | 2.3 | 27.1 | 46.7 | 2.2 | | 0.0 | 0.008 |
| TX-197-47 | TFA | 11.9 | 2.0 | 0.7 | 7.3 | 73.0 | 5.2 | 3.2 | | |
| TX-197-47 | TAG | 10.4 | 3.6 | 2.4 | 19.7 | 60.1 | 3.8 | | 0.1 | 0.028 |
| TX-197-49 | TFA | 12.0 | 1.7 | 2.1 | 16.0 | 63.1 | 5.1 | 3.2 | | |
| TX-197-49 | TAG | 13.5 | 3.8 | 6.6 | 36.9 | 31.9 | 7.3 | | 0.3 | 0.085 |
| TX-197-28 | TFA | 11.1 | 1.3 | 0.4 | 8.0 | 75.6 | 3.5 | 3.2 | | |
| TX-197-28 | TAG | 17.5 | 4.9 | 1.3 | 22.3 | 47.4 | 6.6 | | 0.1 | 0.024 |
| TX-197-14 | TFA | 9.8 | 1.2 | 0.8 | 10.2 | 72.8 | 5.2 | 3.3 | | |
| TX-197-14 | TAG | 9.4 | 2.7 | 3.5 | 39.4 | 39.5 | 5.5 | | 0.1 | 0.045 |
| TX-197-51 | TFA | 12.5 | 2.0 | 1.0 | 10.6 | 68.3 | 5.6 | 3.4 | | |
| TX-197-51 | TAG | 14.0 | 4.5 | 2.3 | 22.4 | 49.8 | 7.0 | | 0.4 | 0.122 |
| TX-136-01 | TFA | 12.5 | 1.5 | 1.3 | 13.3 | 69.1 | 2.3 | 3.4 | | |
| TX-136-01 | TAG | 15.0 | 3.1 | 2.8 | 27.8 | 44.9 | 6.4 | | 0.8 | 0.234 |
| TX-197-11 | TFA | 10.2 | 1.1 | 0.9 | 11.2 | 71.1 | 5.5 | 3.5 | | |
| TX-197-11 | TAG | 12.2 | 3.3 | 4.6 | 43.3 | 30.0 | 6.6 | | 0.1 | 0.034 |
| TX-197-33 | TFA | 10.9 | 1.4 | 0.4 | 8.0 | 75.7 | 3.6 | 3.5 | | |
| TX-197-33 | TAG | 14.0 | 4.7 | 1.6 | 20.4 | 53.0 | 6.3 | | 0.1 | 0.025 |
| TX-136-25 | TFA | 13.1 | 2.4 | 0.6 | 11.5 | 67.5 | 4.9 | 3.8 | | |
| TX-136-25 | TAG | 15.8 | 4.4 | 1.2 | 21.1 | 49.7 | 7.8 | | 0.8 | 0.202 |
| TX-197-09 | TFA | 10.5 | 1.3 | 0.7 | 9.4 | 73.0 | 5.1 | 3.8 | | |
| TX-197-09 | TAG | 11.5 | 3.5 | 2.4 | 30.4 | 48.4 | 3.9 | | 0.2 | 0.047 |
| TX-197-30 | TFA | 11.8 | 1.7 | 0.6 | 8.9 | 73.0 | 4.0 | 3.8 | | |
| TX-197-30 | TAG | 15.3 | 4.1 | 1.6 | 22.0 | 51.3 | 5.7 | | 0.2 | 0.051 |
| TX-197-23 | TFA | 10.5 | 1.4 | 1.4 | 14.1 | 67.5 | 5.1 | 4.3 | | |
| TX-197-23 | TAG | 13.1 | 3.0 | 3.7 | 36.3 | 38.7 | 5.3 | | 0.8 | 0.175 |
| TX-197-37 | TFA | 10.3 | 2.0 | 2.4 | 18.6 | 62.8 | 3.9 | 5.0 | | |
| TX-197-37 | TAG | 12.9 | 4.0 | 6.2 | 38.7 | 31.6 | 6.7 | | 1.2 | 0.230 |

TABLE 13
TFA and TAG levels, fatty acid composition and TTQ in sorghum leaves
transformed with pOIL197 or pOIL136 (pZmUbi:DGAT; pZmUbi:Oleosin) during the
boot leaf stage of growth. The lines are listed in order of increasing TFA levels.

| | TAG or | | | | | | | | | |
|---|---|---|---|---|---|---|---|---|---|---|
| Line | TFA | C16:0 | C18:0 | C18:1 | C18:2 | C18:3n3 | Other | TFA | TAG | TTQ |
| TX-197-14 | TFA | 12.7 | 5.2 | 2.0 | 14.4 | 57.7 | 8.1 | 1.2 | | |
| TX-197-14 | TAG | 8.8 | 7.1 | 3.1 | 22.7 | 54.7 | 3.6 | | 0.3 | 0.266 |
| TX-197-15 | TFA | 14.5 | 5.0 | 2.3 | 14.7 | 55.8 | 7.7 | 1.2 | | |
| TX-197-15 | TAG | 12.7 | 7.1 | 3.2 | 21.0 | 51.7 | 4.3 | | 0.3 | 0.262 |
| TX-197-19 | TFA | 13.1 | 3.2 | 2.0 | 14.3 | 60.9 | 6.4 | 1.2 | | |
| TX-197-19 | TAG | 10.6 | 4.3 | 3.4 | 24.4 | 54.0 | 3.2 | | 0.2 | 0.203 |
| TX-136-03 | TFA | 14.1 | 1.8 | 1.7 | 12.6 | 65.0 | 4.8 | 1.2 | | |
| TX-136-03 | TAG | 14.5 | 4.3 | 4.5 | 32.9 | 42.2 | 1.6 | | 0.1 | 0.045 |
| TX-197-08 | TFA | 14.4 | 3.5 | 1.3 | 14.2 | 62.2 | 4.4 | 1.2 | | |
| TX-197-08 | TAG | 13.7 | 5.2 | 2.7 | 22.4 | 50.5 | 5.5 | | 0.3 | 0.211 |
| TX-197-11 | TFA | 14.1 | 3.8 | 2.0 | 15.0 | 57.0 | 8.2 | 1.3 | | |
| TX-197-11 | TAG | 10.3 | 4.8 | 3.0 | 22.8 | 55.9 | 3.1 | | 0.3 | 0.267 |
| TX-136-24 | TFA | 15.5 | 2.2 | 2.2 | 16.9 | 58.1 | 5.2 | 1.3 | | |
| TX-136-24 | TAG | 14.7 | 3.3 | 4.0 | 32.4 | 42.9 | 2.7 | | 0.2 | 0.164 |
| TX-136-02 | TFA | 12.3 | 1.5 | 1.4 | 14.7 | 65.7 | 4.4 | 1.5 | | |
| TX-136-02 | TAG | 13.9 | 2.7 | 3.0 | 28.7 | 46.6 | 5.1 | | 0.7 | 0.444 |
| TX-197-30 | TFA | 13.1 | 2.3 | 1.3 | 9.3 | 65.1 | 8.8 | 2.0 | | |
| TX-197-30 | TAG | 10.0 | 3.0 | 2.2 | 15.0 | 65.3 | 4.5 | | 0.4 | 0.223 |
| TX-197-46 | TFA | 13.2 | 2.5 | 0.8 | 7.9 | 71.2 | 4.5 | 2.0 | | |
| TX-197-46 | TAG | 17.3 | 18.6 | 3.2 | 14.7 | 42.5 | 3.7 | | 0.1 | 0.033 |
| TX-197-45 | TFA | 13.6 | 2.7 | 0.6 | 6.7 | 71.7 | 4.5 | 2.1 | | |
| TX-197-45 | TAG | 22.7 | 17.7 | 4.4 | 12.9 | 38.6 | 3.6 | | 0.1 | 0.030 |
| TX-197-39 | TFA | 12.6 | 3.6 | 1.1 | 9.0 | 66.2 | 7.4 | 2.1 | | |
| TX-197-39 | TAG | 9.5 | 4.0 | 1.6 | 12.8 | 66.7 | 5.5 | | 0.6 | 0.291 |
| TX-197-22 | TFA | 13.6 | 2.0 | 0.8 | 7.3 | 71.3 | 4.9 | 2.1 | | |
| TX-197-22 | TAG | 13.8 | 3.3 | 1.8 | 14.2 | 64.6 | 2.3 | | 0.1 | 0.056 |
| TX-197-34 | TFA | 12.0 | 3.2 | 1.2 | 9.6 | 67.9 | 5.9 | 2.2 | | |
| TX-197-34 | TAG | 9.1 | 4.6 | 2.3 | 18.4 | 63.2 | 2.3 | | 0.4 | 0.190 |
| TX-197-50 | TFA | 13.0 | 2.5 | 1.1 | 9.1 | 66.8 | 7.5 | 2.5 | | |
| TX-197-50 | TAG | 11.4 | 4.6 | 2.1 | 15.3 | 59.8 | 6.9 | | 0.5 | 0.183 |
| TX-197-43 | TFA | 12.4 | 2.3 | 0.7 | 8.0 | 71.9 | 4.7 | 2.5 | | |
| TX-197-43 | TAG | 11.0 | 4.4 | 1.8 | 15.7 | 62.3 | 4.8 | | 0.2 | 0.065 |
| TX-197-32 | TFA | 12.5 | 2.1 | 1.1 | 9.0 | 70.0 | 5.3 | 2.5 | | |
| TX-197-32 | TAG | 12.8 | 3.7 | 2.1 | 16.1 | 60.3 | 5.0 | | 0.6 | 0.220 |
| TX-197-33 | TFA | 12.1 | 2.7 | 0.7 | 7.9 | 71.0 | 5.6 | 2.5 | | |
| TX-197-33 | TAG | 11.1 | 4.8 | 1.4 | 15.4 | 62.4 | 4.9 | | 0.3 | 0.130 |
| TX-197-41 | TFA | 12.8 | 1.9 | 0.7 | 8.1 | 72.8 | 3.7 | 2.6 | | |
| TX-197-41 | TAG | 15.1 | 5.9 | 2.4 | 16.7 | 53.7 | 6.3 | | 0.2 | 0.065 |
| TX-197-36 | TFA | 12.2 | 2.0 | 0.8 | 7.7 | 71.6 | 5.6 | 2.6 | | |
| TX-197-36 | TAG | 11.4 | 3.4 | 1.6 | 13.9 | 65.6 | 4.1 | | 0.4 | 0.158 |
| TX-197-42 | TFA | 12.4 | 2.1 | 0.8 | 8.2 | 70.3 | 6.3 | 2.7 | | |
| TX-197-42 | TAG | 12.4 | 5.4 | 2.3 | 17.8 | 57.1 | 5.0 | | 0.2 | 0.060 |
| TX-197-51 | TFA | 13.6 | 2.1 | 1.0 | 9.9 | 66.8 | 6.6 | 2.7 | | |
| TX-197-51 | TAG | 13.1 | 4.6 | 3.0 | 18.8 | 53.4 | 7.0 | | 0.5 | 0.175 |
| TX-197-49 | TFA | 15.2 | 2.9 | 1.0 | 9.3 | 65.3 | 6.3 | 2.7 | | |
| TX-197-49 | TAG | 17.3 | 5.0 | 2.0 | 16.7 | 52.7 | 6.3 | | 0.5 | 0.192 |
| TX-197-48 | TFA | 13.0 | 2.3 | 1.0 | 8.8 | 68.5 | 6.4 | 2.8 | | |
| TX-197-48 | TAG | 13.0 | 4.7 | 2.2 | 16.1 | 58.0 | 6.0 | | 0.4 | 0.144 |
| TX-197-38 | TFA | 12.2 | 2.0 | 1.0 | 7.7 | 72.1 | 5.0 | 2.9 | | |
| TX-197-38 | TAG | 11.2 | 3.4 | 2.2 | 14.9 | 63.8 | 4.5 | | 0.5 | 0.160 |
| TX-197-35 | TFA | 12.8 | 1.8 | 0.9 | 8.5 | 69.4 | 6.6 | 2.9 | | |
| TX-197-35 | TAG | 12.7 | 2.9 | 1.7 | 14.5 | 63.3 | 4.9 | | 0.7 | 0.227 |
| TX-197-40 | TFA | 12.7 | 1.9 | 0.7 | 7.7 | 73.9 | 3.1 | 2.9 | | |
| TX-197-40 | TAG | 16.3 | 4.7 | 3.3 | 20.8 | 52.4 | 2.6 | | 0.1 | 0.031 |
| TX-197-47 | TFA | 13.9 | 2.4 | 0.6 | 6.9 | 72.2 | 3.9 | 2.9 | | |
| TX-197-47 | TAG | 24.6 | 19.8 | 5.2 | 10.7 | 34.8 | 4.9 | | 0.0 | 0.017 |
| TX-136-01 | TFA | 11.6 | 1.4 | 1.3 | 14.1 | 67.2 | 4.3 | 3.3 | | |
| TX-136-01 | TAG | 14.6 | 2.9 | 3.0 | 29.5 | 44.1 | 5.9 | | 0.7 | 0.199 |
| TX-197-44 | TFA | 13.5 | 2.1 | 1.4 | 14.7 | 63.1 | 5.1 | 3.4 | | |
| TX-197-44 | TAG | 14.4 | 4.3 | 3.1 | 25.0 | 45.0 | 8.2 | | 0.8 | 0.245 |
| TX-136-25 | TFA | 13.6 | 2.2 | 0.7 | 10.8 | 67.4 | 5.2 | 3.4 | | |
| TX-136-25 | TAG | 16.6 | 4.2 | 1.4 | 20.1 | 51.5 | 6.1 | | 1.0 | 0.286 |
| TX-197-28 | TFA | 11.5 | 1.3 | 0.4 | 7.8 | 75.3 | 3.6 | 3.4 | | |
| TX-197-28 | TAG | 17.4 | 4.5 | 1.6 | 19.5 | 50.2 | 6.9 | | 0.1 | 0.035 |
| TX-197-37 | TFA | 12.6 | 3.4 | 6.3 | 17.4 | 54.1 | 6.2 | 4.5 | | |
| TX-197-37 | TAG | 13.4 | 5.0 | 10.1 | 27.4 | 40.2 | 3.9 | | 1.9 | 0.426 |

TABLE 14
TFA and TAG levels, fatty acid composition and TTQ in sorghum leaves
transformed with pOIL197 or pOIL136 (pZmUbi:DGAT; pZmUbi:Oleosin) during the mature
seed setting stage of growth. The lines are listed in order of increasing TFA levels.

| | TAG or | | | | | | | | | |
|---|---|---|---|---|---|---|---|---|---|---|
| Line | TFA | C16:0 | C18:0 | C18:1 | C18:2 | C18:3n3 | Other | TFA | TAG | TTQ |
| TX-197-13 | TFA | 15.2 | 6.6 | 2.6 | 12.0 | 44.7 | 18.8 | 1.0 | | |
| TX-197-13 | TAG | 10.2 | 7.0 | 2.7 | 20.4 | 55.6 | 4.1 | | 0.1 | 0.131 |
| TX-197-22 | TFA | 16.0 | 4.3 | 2.3 | 8.5 | 54.6 | 14.3 | 1.0 | | |
| TX-197-22 | TAG | 13.8 | 7.6 | 3.5 | 12.7 | 59.7 | 2.7 | | 0.2 | 0.153 |
| TX-197-19 | TFA | 13.6 | 5.3 | 1.1 | 12.4 | 56.4 | 11.2 | 1.1 | | |
| TX-197-19 | TAG | 10.8 | 8.3 | 1.6 | 18.6 | 55.2 | 5.5 | | 0.2 | 0.209 |
| TX-197-18 | TFA | 14.2 | 4.9 | 2.6 | 11.2 | 52.9 | 14.1 | 1.1 | | |
| TX-197-18 | TAG | 10.6 | 7.8 | 2.9 | 18.9 | 56.2 | 3.5 | | 0.2 | 0.148 |
| TX-136-24 | TFA | 15.1 | 4.6 | 1.5 | 12.7 | 57.6 | 8.5 | 1.2 | | |
| TX-136-24 | TAG | 11.3 | 5.2 | 2.1 | 18.9 | 56.5 | 6.1 | | 0.2 | 0.191 |
| TX-197-15 | TFA | 13.2 | 6.5 | 1.1 | 14.4 | 57.6 | 7.3 | 1.3 | | |
| TX-197-15 | TAG | 9.2 | 8.2 | 1.7 | 21.1 | 54.0 | 5.8 | | 0.3 | 0.239 |
| TX-197-10 | TFA | 12.8 | 7.6 | 1.6 | 15.2 | 50.0 | 12.8 | 1.3 | | |
| TX-197-10 | TAG | 8.9 | 7.7 | 1.9 | 22.6 | 53.9 | 5.0 | | 0.4 | 0.301 |
| TX-197-11 | TFA | 13.5 | 5.8 | 1.7 | 14.0 | 57.1 | 8.0 | 1.3 | | |
| TX-197-11 | TAG | 9.0 | 6.7 | 2.2 | 20.3 | 56.9 | 4.9 | | 0.3 | 0.242 |
| TX-197-33 | TFA | 14.8 | 4.9 | 1.8 | 12.6 | 54.9 | 10.9 | 1.3 | | |
| TX-197-33 | TAG | 12.3 | 6.2 | 2.6 | 21.3 | 51.3 | 6.3 | | 0.5 | 0.372 |
| TX-197-20 | TFA | 15.4 | 3.8 | 1.1 | 9.4 | 62.7 | 7.6 | 1.3 | | |
| TX-197-20 | TAG | 21.9 | 13.9 | 3.9 | 17.6 | 36.4 | 6.3 | | 0.1 | 0.043 |
| TX-197-21 | TFA | 14.8 | 3.6 | 1.3 | 13.0 | 61.0 | 6.3 | 1.4 | | |
| TX-197-21 | TAG | 24.9 | 14.9 | 4.5 | 22.7 | 27.3 | 5.7 | | 0.0 | 0.026 |
| TX-197-09 | TFA | 15.6 | 5.0 | 1.8 | 15.1 | 53.6 | 8.9 | 1.5 | | |
| TX-197-09 | TAG | 13.6 | 6.1 | 2.6 | 21.3 | 51.7 | 4.7 | | 0.4 | 0.277 |
| TX-197-38 | TFA | 13.9 | 4.2 | 1.4 | 12.0 | 59.7 | 8.7 | 1.6 | | |
| TX-197-38 | TAG | 12.3 | 6.4 | 2.7 | 21.6 | 49.7 | 7.4 | | 0.4 | 0.230 |
| TX-197-32 | TFA | 14.2 | 3.6 | 1.5 | 13.3 | 58.5 | 8.9 | 1.7 | | |
| TX-197-32 | TAG | 12.3 | 5.2 | 2.7 | 22.1 | 50.5 | 7.3 | | 0.5 | 0.279 |
| TX-197-17 | TFA | 14.4 | 3.5 | 1.5 | 12.4 | 57.0 | 11.3 | 2.0 | | |
| TX-197-17 | TAG | 14.0 | 4.9 | 1.5 | 17.0 | 52.1 | 10.4 | | 0.7 | 0.333 |
| TX-197-40 | TFA | 13.3 | 3.5 | 1.2 | 8.6 | 63.9 | 9.5 | 2.1 | | |
| TX-197-40 | TAG | 13.5 | 7.9 | 2.2 | 16.2 | 56.0 | 4.2 | | 0.1 | 0.042 |
| TX-197-16 | TFA | 13.9 | 4.7 | 1.2 | 13.8 | 54.1 | 12.3 | 2.1 | | |
| TX-197-16 | TAG | 10.9 | 5.9 | 1.7 | 18.6 | 51.8 | 11.1 | | 0.9 | 0.444 |

TABLE 15
TFA and TAG levels, fatty acid composition and TTQ in sorghum leaves
transformed with pOIL102 (pZmUbi:WRI1) during the vegetative stage of growth.

| | TAG or | | | | | | | | | |
|---|---|---|---|---|---|---|---|---|---|---|
| Line | TFA | C16:0 | C18:0 | C18:1 | C18:2 | C18:3n3 | Other | TFA | TAG | TTQ |
| TX-102-1 | TFA | 17.3 | 2.4 | 3.1 | 15.6 | 55.8 | 5.9 | 1.2 | | |
| TX-102-1 | TAG | 13.5 | 2.6 | 5.6 | 28.7 | 43.5 | 6.1 | | 0.2 | 0.182 |
| TX-102-6 | TFA | 12.4 | 1.4 | 1.1 | 9.6 | 71.7 | 3.8 | 2.0 | | |
| TX-102-6 | TAG | 21.2 | 13.4 | 4.6 | 27.3 | 32.3 | 1.3 | | 0.0 | 0.015 |
| TX-102-4 | TFA | 11.2 | 1.0 | 0.7 | 7.7 | 76.4 | 3.0 | 2.2 | | |
| TX-102-4 | TAG | 11.3 | 3.3 | 2.0 | 23.7 | 59.6 | 0.0 | | 0.0 | 0.019 |
| TX-102-8 | TFA | 10.2 | 1.2 | 0.5 | 7.2 | 77.9 | 3.0 | 2.3 | | |
| TX-102-8 | TAG | 11.6 | 3.4 | 0.0 | 23.2 | 61.8 | 0.0 | | 0.0 | 0.013 |
| TX-102-5 | TFA | 11.1 | 1.6 | 0.9 | 8.8 | 74.3 | 3.3 | 2.4 | | |
| TX-102-5 | TAG | 17.1 | 12.2 | 0.0 | 27.5 | 43.2 | 0.0 | | 0.0 | 0.015 |
| TX-102-2 | TFA | 11.4 | 1.5 | 1.0 | 9.4 | 73.5 | 3.2 | 2.4 | | |
| TX-102-2 | TAG | 13.7 | 2.9 | 3.6 | 31.2 | 48.6 | 0.0 | | 0.0 | 0.018 |
| TX-102-3 | TFA | 11.8 | 1.5 | 1.0 | 8.8 | 73.3 | 3.7 | 2.6 | | |
| TX-102-3 | TAG | 17.1 | 3.7 | 4.4 | 29.9 | 44.0 | 0.9 | | 0.0 | 0.016 |
| TX-102-7 | TFA | 12.1 | 1.4 | 1.0 | 9.3 | 72.4 | 3.8 | 2.6 | | |
| TX-102-7 | TAG | 20.9 | 15.0 | 4.8 | 26.4 | 31.6 | 1.3 | | 0.0 | 0.013 |

TABLE 16
TFA and TAG levels, fatty acid composition and TTQ in sorghum leaves
transformed with pOIL102 (pZmUbi:WRI1) during the boot leaf stage of growth.

| | TAG or | | | | | | | | | |
|---|---|---|---|---|---|---|---|---|---|---|
| Line | TFA | C16:0 | C18:0 | C18:1 | C18:2 | C18:3n3 | Other | TFA | TAG | TTQ |
| TX-102-8 | TFA | 16.9 | 4.2 | 2.3 | 12.3 | 57.7 | 6.5 | 0.9 | | |
| TX-102-8 | TAG | 14.5 | 6.2 | 13.5 | 25.7 | 36.8 | 3.4 | | 0.2 | 0.243 |
| TX-102-4 | TFA | 17.1 | 4.2 | 2.0 | 12.5 | 57.5 | 6.7 | 0.9 | | |
| TX-102-4 | TAG | 10.5 | 4.4 | 3.0 | 20.0 | 59.6 | 2.6 | | 0.2 | 0.182 |
| TX-102-1 | TFA | 16.6 | 4.3 | 3.9 | 15.4 | 50.7 | 9.1 | 1.1 | | |
| TX-102-1 | TAG | 10.7 | 4.4 | 5.3 | 21.9 | 54.1 | 3.6 | | 0.3 | 0.273 |
| TX-102-5 | TFA | 16.7 | 4.1 | 1.7 | 11.6 | 60.2 | 5.8 | 1.1 | | |
| TX-102-5 | TAG | 11.7 | 5.5 | 2.8 | 21.4 | 56.1 | 2.5 | | 0.1 | 0.118 |
| TX-102-6 | TFA | 17.8 | 3.8 | 15.9 | 17.0 | 38.8 | 6.6 | 1.5 | | |
| TX-102-6 | TAG | 19.6 | 7.0 | 29.4 | 25.4 | 13.9 | 4.7 | | 0.4 | 0.267 |
| TX-102-2 | TFA | 15.0 | 1.9 | 1.7 | 19.1 | 56.5 | 5.9 | 1.7 | | |
| TX-102-2 | TAG | 10.6 | 1.9 | 2.7 | 30.2 | 51.2 | 3.4 | | 0.4 | 0.258 |
| TX-102-7 | TFA | 15.0 | 3.1 | 7.0 | 13.9 | 56.1 | 4.9 | 2.4 | | |
| TX-102-7 | TAG | 16.1 | 6.5 | 20.5 | 28.0 | 24.4 | 4.5 | | 0.3 | 0.111 |
| TX-102-3 | TFA | 14.4 | 3.5 | 9.5 | 13.4 | 50.9 | 8.2 | 2.5 | | |
| TX-102-3 | TAG | 16.9 | 6.7 | 23.9 | 24.7 | 22.5 | 5.2 | | 0.4 | 0.150 |

TABLE 17
TFA and TAG levels, fatty acid composition and TTQ in sorghum leaves transformed
with pOIL102 (pZmUbi:WRI1) during the mature seed setting stage of growth.

| | TAG or | | | | | | | | | |
|---|---|---|---|---|---|---|---|---|---|---|
| Line | TFA | C16:0 | C18:0 | C18:1 | C18:2 | C18:3n3 | Other | TFA | TAG | TTQ |
| TX-102-5 | TFA | 17.0 | 5.2 | 1.8 | 11.2 | 53.2 | 11.5 | 1.0 | | |
| TX-102-5 | TAG | 15.7 | 7.6 | 3.5 | 19.8 | 49.7 | 3.8 | | 0.1 | 0.090 |
| TX-102-8 | TFA | 17.1 | 5.0 | 2.6 | 12.5 | 50.0 | 12.8 | 1.0 | | |
| TX-102-8 | TAG | 18.0 | 9.4 | 4.6 | 21.5 | 41.5 | 4.9 | | 0.1 | 0.096 |
| TX-102-1 | TFA | 17.2 | 5.2 | 2.6 | 17.7 | 45.5 | 11.9 | 1.0 | | |
| TX-102-1 | TAG | 13.3 | 6.8 | 4.0 | 26.5 | 43.8 | 5.6 | | 0.2 | 0.203 |
| TX-102-9 | TFA | 15.9 | 5.1 | 1.6 | 12.9 | 53.8 | 10.8 | 1.1 | | |
| TX-102-9 | TAG | 14.0 | 7.2 | 3.2 | 24.1 | 48.3 | 3.2 | | 0.1 | 0.089 |
| TX-102-4 | TFA | 17.4 | 5.3 | 3.1 | 12.0 | 48.4 | 13.7 | 1.1 | | |
| TX-102-4 | TAG | 15.4 | 6.2 | 4.1 | 22.0 | 48.1 | 4.2 | | 0.1 | 0.092 |
| TX-102-6 | TFA | 18.2 | 4.7 | 6.3 | 18.6 | 40.9 | 11.3 | 1.5 | | |
| TX-102-6 | TAG | 18.4 | 7.6 | 14.5 | 31.7 | 21.0 | 6.8 | | 0.2 | 0.147 |
| TX-102-2 | TFA | 14.4 | 6.8 | 29.7 | 18.8 | 18.8 | 11.4 | 2.0 | | |
| TX-102-2 | TAG | 12.3 | 9.1 | 40.3 | 21.8 | 7.4 | 9.0 | | 0.9 | 0.456 |

TABLE 18
TFA and TAG levels, fatty acid composition and TTQ in sorghum leaves transformed
with pOIL102 (pZmUbi:WRI1) and pOIL197 (pZmUbi:DGAT and pZmUbi:Oleosin) during the
vegetative stage of growth. The lines are listed in order of increasing TFA levels.

| | TAG or | | | | | | | | | |
|---|---|---|---|---|---|---|---|---|---|---|
| Line | TFA | C16:0 | C18:0 | C18:1 | C18:2 | C18:3n3 | Other | TFA | TAG | TTQ |
| TX-02-28 | TFA | 12.0 | 2.4 | 0.6 | 9.5 | 71.2 | 4.4 | 2.2 | | |
| TX-02-28 | TAG | 11.6 | 5.0 | 1.4 | 16.1 | 61.1 | 4.8 | | 0.2 | 0.081 |
| TX-02-18 | TFA | 12.9 | 2.3 | 0.8 | 10.0 | 69.6 | 4.4 | 2.2 | | |
| TX-02-18 | TAG | 11.1 | 4.9 | 1.9 | 21.7 | 58.2 | 2.2 | | 0.1 | 0.059 |
| TX-02-37 | TFA | 8.7 | 1.2 | 0.4 | 7.0 | 79.1 | 3.7 | 2.3 | | |
| TX-02-37 | TAG | 18.3 | 6.5 | 0.0 | 24.0 | 45.7 | 5.5 | | 0.0 | 0.013 |
| TX-02-29 | TFA | 12.0 | 2.6 | 0.5 | 7.5 | 72.3 | 5.1 | 2.4 | | |
| TX-02-29 | TAG | 10.0 | 3.8 | 1.3 | 14.5 | 66.1 | 4.3 | | 0.1 | 0.041 |
| TX-02-126 | TFA | 13.2 | 1.5 | 0.6 | 10.0 | 70.5 | 4.1 | 2.6 | | |
| TX-02-126 | TAG | 17.4 | 3.3 | 1.6 | 22.3 | 49.8 | 5.6 | | 0.2 | 0.085 |
| TX-02-23 | TFA | 11.0 | 2.9 | 0.4 | 5.9 | 73.1 | 6.8 | 2.6 | | |
| TX-02-23 | TAG | 11.1 | 3.9 | 1.6 | 12.9 | 66.7 | 3.9 | | 0.1 | 0.048 |
| TX-02-38 | TFA | 19.6 | 2.0 | 3.1 | 20.5 | 47.8 | 6.9 | 2.7 | | |
| TX-02-38 | TAG | 28.4 | 3.4 | 5.8 | 31.7 | 21.5 | 9.3 | | 2.2 | 0.832 |
| TX-02-24 | TFA | 10.9 | 2.5 | 0.4 | 6.3 | 74.5 | 5.3 | 2.8 | | |
| TX-02-24 | TAG | 16.1 | 5.2 | 2.4 | 11.6 | 58.3 | 6.4 | | 0.1 | 0.033 |
| TX-02-25 | TFA | 10.9 | 2.1 | 0.6 | 8.9 | 72.2 | 5.3 | 2.9 | | |
| TX-02-25 | TAG | 9.5 | 4.3 | 1.5 | 15.7 | 61.7 | 7.3 | | 0.3 | 0.099 |
| TX-02-31 | TFA | 9.3 | 1.2 | 0.6 | 8.7 | 76.4 | 3.7 | 3.1 | | |
| TX-02-31 | TAG | 24.5 | 7.2 | 4.5 | 33.7 | 30.2 | 0.0 | | 0.0 | 0.007 |
| TX-02-129 | TFA | 11.3 | 1.4 | 0.6 | 9.0 | 74.0 | 3.8 | 3.2 | | |
| TX-02-129 | TAG | 18.7 | 5.0 | 2.2 | 28.1 | 38.7 | 7.2 | | 0.1 | 0.026 |
| TX-02-34 | TFA | 10.1 | 1.3 | 0.8 | 10.2 | 73.4 | 4.2 | 3.3 | | |
| TX-02-34 | TAG | 14.0 | 3.4 | 2.5 | 28.2 | 46.3 | 5.6 | | 0.3 | 0.098 |
| TX-02-127 | TFA | 11.3 | 1.6 | 0.4 | 6.6 | 77.3 | 2.7 | 3.4 | | |
| TX-02-127 | TAG | 14.6 | 5.6 | 1.9 | 16.6 | 52.9 | 8.5 | | 0.0 | 0.012 |
| TX-02-09 | TFA | 11.9 | 2.1 | 0.6 | 8.7 | 73.5 | 3.3 | 3.5 | | |
| TX-02-09 | TAG | 12.4 | 5.0 | 1.8 | 21.9 | 56.0 | 3.0 | | 0.1 | 0.024 |
| TX-02-131 | TFA | 11.0 | 1.4 | 0.3 | 8.1 | 75.9 | 3.2 | 3.5 | | |
| TX-02-131 | TAG | 16.9 | 4.9 | 1.1 | 21.3 | 48.8 | 6.9 | | 0.1 | 0.023 |
| TX-02-33 | TFA | 8.6 | 1.1 | 0.5 | 8.4 | 78.1 | 3.4 | 3.5 | | |
| TX-02-33 | TAG | 19.9 | 5.9 | 3.0 | 28.7 | 34.9 | 7.5 | | 0.0 | 0.010 |
| TX-02-36 | TFA | 9.5 | 1.3 | 0.8 | 11.0 | 73.5 | 4.0 | 3.6 | | |
| TX-02-36 | TAG | 13.7 | 3.8 | 2.6 | 33.7 | 41.7 | 4.6 | | 0.3 | 0.071 |
| TX-02-35 | TFA | 9.2 | 1.3 | 0.4 | 6.8 | 77.9 | 4.3 | 3.6 | | |
| TX-02-35 | TAG | 21.6 | 7.7 | 2.0 | 20.5 | 39.3 | 9.0 | | 0.0 | 0.012 |
| TX-02-10 | TFA | 12.3 | 2.0 | 3.4 | 20.8 | 56.6 | 4.7 | 4.0 | | |
| TX-02-10 | TAG | 18.5 | 4.0 | 7.8 | 38.5 | 23.6 | 7.5 | | 1.0 | 0.250 |
| TX-02-30 | TFA | 14.9 | 3.8 | 1.9 | 14.3 | 59.0 | 6.1 | 4.1 | | |
| TX-02-30 | TAG | 18.6 | 7.6 | 4.1 | 24.8 | 33.7 | 11.2 | | 0.9 | 0.223 |
| TX-02-12 | TFA | 13.7 | 1.6 | 0.8 | 10.1 | 69.0 | 4.7 | 4.5 | | |
| TX-02-12 | TAG | 10.5 | 4.2 | 1.7 | 26.2 | 55.5 | 1.9 | | 0.1 | 0.024 |
| TX-02-08 | TFA | 16.6 | 2.2 | 1.9 | 11.0 | 63.9 | 4.5 | 4.5 | | |
| TX-02-08 | TAG | 22.6 | 5.6 | 6.4 | 24.2 | 34.2 | 7.0 | | 0.2 | 0.039 |
| TX-02-27 | TFA | 10.9 | 1.2 | 0.5 | 8.9 | 75.8 | 2.7 | 4.6 | | |
| TX-02-27 | TAG | 19.0 | 6.0 | 2.7 | 27.8 | 39.2 | 5.3 | | 0.0 | 0.011 |
| TX-02-13 | TFA | 14.6 | 1.5 | 1.1 | 12.9 | 65.4 | 4.4 | 4.6 | | |
| TX-02-13 | TAG | 11.9 | 5.1 | 3.8 | 34.0 | 39.5 | 5.7 | | 0.3 | 0.062 |
| TX-02-05 | TFA | 14.3 | 1.4 | 0.9 | 12.1 | 66.6 | 4.7 | 5.2 | | |
| TX-02-05 | TAG | 10.4 | 3.0 | 4.0 | 42.7 | 35.8 | 4.1 | | 0.2 | 0.031 |
| TX-02-21 | TFA | 13.8 | 1.0 | 0.6 | 10.9 | 67.9 | 5.7 | 5.3 | | |
| TX-02-21 | TAG | 9.0 | 3.2 | 1.2 | 23.1 | 59.3 | 4.2 | | 0.6 | 0.121 |
| TX-02-07 | TFA | 15.6 | 1.7 | 0.6 | 8.6 | 68.9 | 4.6 | 5.5 | | |
| TX-02-07 | TAG | 21.8 | 6.4 | 3.6 | 24.6 | 34.8 | 8.8 | | 0.1 | 0.019 |
| TX-02-11 | TFA | 21.0 | 1.9 | 0.6 | 8.9 | 62.3 | 5.2 | 5.6 | | |
| TX-02-11 | TAG | 28.4 | 10.5 | 3.8 | 22.8 | 27.1 | 7.4 | | 0.2 | 0.027 |
| TX-02-14 | TFA | 15.4 | 2.4 | 1.8 | 11.5 | 64.6 | 4.2 | 5.7 | | |
| TX-02-14 | TAG | 17.0 | 6.0 | 6.1 | 32.1 | 32.6 | 6.1 | | 0.2 | 0.029 |
| TX-02-16 | TFA | 19.8 | 1.6 | 4.2 | 25.8 | 43.5 | 5.0 | 5.7 | | |
| TX-02-16 | TAG | 25.7 | 2.5 | 7.5 | 38.8 | 18.6 | 6.9 | | 2.7 | 0.481 |
| TX-02-01 | TFA | 13.9 | 1.4 | 0.6 | 10.5 | 69.1 | 4.6 | 5.8 | | |
| TX-02-01 | TAG | 9.4 | 3.3 | 2.4 | 29.9 | 51.9 | 3.1 | | 0.1 | 0.012 |
| TX-02-02 | TFA | 15.2 | 1.8 | 0.8 | 10.5 | 67.3 | 4.4 | 5.8 | | |
| TX-02-02 | TAG | 12.7 | 3.7 | 3.3 | 35.6 | 39.1 | 5.6 | | 0.2 | 0.036 |
| TX-02-06 | TFA | 17.7 | 1.5 | 0.7 | 9.4 | 66.3 | 4.2 | 6.1 | | |
| TX-02-06 | TAG | 25.6 | 3.9 | 3.0 | 23.9 | 35.2 | 8.4 | | 0.2 | 0.033 |
| TX-02-04 | TFA | 12.8 | 1.3 | 1.0 | 11.8 | 68.7 | 4.5 | 6.3 | | |
| TX-02-04 | TAG | 17.9 | 4.0 | 3.7 | 32.7 | 35.9 | 5.8 | | 0.1 | 0.013 |
| TX-02-19 | TFA | 11.9 | 1.8 | 1.5 | 15.6 | 64.5 | 4.7 | 7.2 | | |
| TX-02-19 | TAG | 10.9 | 3.9 | 5.2 | 41.9 | 30.6 | 7.5 | | 0.7 | 0.097 |

TABLE 19
TFA and TAG levels, fatty acid composition and TTQ in sorghum leaves transformed
with pOIL102 (pZmUbi:WRI1) and pOIL197 (pZmUbi:DGAT and pZmUbi:Oleosin) during the
boot leaf stage of growth. The lines are listed in order of increasing TFA levels.

| | TAG or | | | | | | | | | |
|---|---|---|---|---|---|---|---|---|---|---|
| Line | TFA | C16:0 | C18:0 | C18:1 | C18:2 | C18:3n3 | Other | TFA | TAG | TTQ |
| TX-02-27 | TFA | 17.3 | 3.8 | 1.4 | 10.1 | 60.1 | 7.2 | 1.0 | | |
| TX-02-27 | TAG | 11.9 | 4.4 | 2.1 | 19.4 | 61.2 | 0.8 | | 0.2 | 0.164 |
| TX-02-21 | TFA | 15.9 | 2.3 | 2.0 | 19.3 | 53.3 | 7.3 | 1.2 | | |
| TX-02-21 | TAG | 12.6 | 3.7 | 2.7 | 27.0 | 51.0 | 3.0 | | 0.4 | 0.318 |
| TX-02-01 | TFA | 15.2 | 4.2 | 5.1 | 14.7 | 53.2 | 7.5 | 1.3 | | |
| TX-02-01 | TAG | 11.7 | 5.6 | 9.3 | 26.1 | 42.9 | 4.5 | | 0.3 | 0.199 |
| TX-02-12 | TFA | 15.3 | 3.2 | 2.0 | 13.6 | 58.9 | 6.9 | 1.3 | | |
| TX-02-12 | TAG | 13.7 | 4.2 | 3.6 | 25.1 | 50.4 | 2.9 | | 0.1 | 0.111 |
| TX-02-33 | TFA | 15.9 | 4.3 | 1.0 | 10.1 | 59.7 | 9.1 | 1.4 | | |
| TX-02-33 | TAG | 14.3 | 5.4 | 2.7 | 18.9 | 54.7 | 4.0 | | 0.1 | 0.107 |
| TX-02-13 | TFA | 15.4 | 5.1 | 11.4 | 19.4 | 39.1 | 9.5 | 1.4 | | |
| TX-02-13 | TAG | 12.9 | 6.5 | 20.3 | 25.2 | 28.6 | 6.4 | | 0.5 | 0.389 |
| TX-02-36 | TFA | 16.2 | 3.4 | 1.8 | 12.3 | 58.5 | 7.8 | 1.4 | | |
| TX-02-36 | TAG | 15.4 | 5.8 | 3.3 | 21.5 | 48.9 | 5.1 | | 0.3 | 0.209 |
| TX-02-37 | TFA | 13.3 | 3.5 | 1.3 | 9.9 | 65.3 | 6.7 | 1.4 | | |
| TX-02-37 | TAG | 9.6 | 3.6 | 3.8 | 20.4 | 60.6 | 2.1 | | 0.2 | 0.137 |
| TX-02-18 | TFA | 14.6 | 3.0 | 1.4 | 9.8 | 65.5 | 5.7 | 1.4 | | |
| TX-02-18 | TAG | 12.5 | 5.6 | 4.3 | 20.6 | 54.8 | 2.3 | | 0.1 | 0.077 |
| TX-02-34 | TFA | 16.6 | 2.2 | 2.2 | 17.6 | 54.7 | 6.7 | 1.4 | | |
| TX-02-34 | TAG | 14.1 | 2.8 | 4.1 | 30.3 | 44.7 | 4.1 | | 0.3 | 0.231 |
| TX-02-31 | TFA | 13.3 | 3.1 | 1.8 | 10.1 | 64.7 | 7.0 | 1.5 | | |
| TX-02-31 | TAG | 5.4 | 1.8 | 3.2 | 17.8 | 71.1 | 0.7 | | 0.3 | 0.171 |
| TX-02-29 | TFA | 13.2 | 3.2 | 1.1 | 8.2 | 68.6 | 5.6 | 1.6 | | |
| TX-02-29 | TAG | 10.5 | 4.7 | 2.9 | 18.1 | 62.0 | 1.8 | | 0.1 | 0.082 |
| TX-02-35 | TFA | 17.8 | 3.4 | 6.5 | 14.0 | 50.3 | 8.0 | 1.6 | | |
| TX-02-35 | TAG | 18.8 | 5.3 | 19.1 | 28.4 | 22.4 | 6.1 | | 0.2 | 0.108 |
| TX-02-09 | TFA | 14.0 | 3.3 | 0.9 | 9.9 | 66.0 | 6.0 | 1.6 | | |
| TX-02-09 | TAG | 11.2 | 4.7 | 1.9 | 19.6 | 58.7 | 3.9 | | 0.1 | 0.036 |
| TX-02-24 | TFA | 12.9 | 3.5 | 0.6 | 7.9 | 67.3 | 7.7 | 1.8 | | |
| TX-02-24 | TAG | 10.7 | 3.5 | 1.6 | 11.8 | 69.0 | 3.4 | | 0.1 | 0.044 |
| TX-02-126 | TFA | 13.8 | 2.7 | 1.1 | 9.9 | 66.4 | 6.0 | 1.8 | | |
| TX-02-126 | TAG | 12.8 | 4.3 | 2.1 | 17.0 | 58.6 | 5.2 | | 0.5 | 0.247 |
| TX-02-23 | TFA | 13.6 | 2.7 | 0.7 | 8.9 | 68.3 | 5.8 | 1.9 | | |
| TX-02-23 | TAG | 10.0 | 3.3 | 2.2 | 18.2 | 63.9 | 2.4 | | 0.1 | 0.047 |
| TX-02-07 | TFA | 17.5 | 2.3 | 10.9 | 17.5 | 44.5 | 7.3 | 1.9 | | |
| TX-02-07 | TAG | 21.0 | 3.9 | 24.5 | 27.4 | 15.2 | 8.0 | | 0.4 | 0.225 |
| TX-02-28 | TFA | 12.8 | 2.9 | 0.5 | 7.7 | 68.4 | 7.8 | 2.0 | | |
| TX-02-28 | TAG | 13.0 | 5.5 | 1.2 | 11.1 | 64.3 | 4.8 | | 0.1 | 0.063 |
| TX-02-04 | TFA | 13.6 | 2.9 | 1.2 | 12.1 | 65.3 | 4.9 | 2.1 | | |
| TX-02-04 | TAG | 12.0 | 4.4 | 2.4 | 21.6 | 55.9 | 3.6 | | 0.4 | 0.206 |
| TX-02-25 | TFA | 12.2 | 2.8 | 0.5 | 9.4 | 68.8 | 6.3 | 2.5 | | |
| TX-02-25 | TAG | 10.3 | 4.2 | 1.0 | 15.4 | 62.5 | 6.6 | | 0.4 | 0.159 |
| TX-02-05 | TFA | 13.6 | 3.6 | 3.2 | 14.7 | 59.8 | 5.1 | 2.5 | | |
| TX-02-05 | TAG | 12.2 | 5.5 | 7.0 | 26.8 | 43.4 | 5.1 | | 0.6 | 0.220 |
| TX-02-14 | TFA | 15.9 | 5.7 | 30.9 | 12.7 | 26.0 | 8.9 | 2.8 | | |
| TX-02-14 | TAG | 17.9 | 8.5 | 42.6 | 14.9 | 7.8 | 8.4 | | 1.4 | 0.514 |
| TX-02-131 | TFA | 12.6 | 1.4 | 0.6 | 8.3 | 73.1 | 3.9 | 2.9 | | |
| TX-02-131 | TAG | 16.0 | 3.9 | 1.9 | 18.0 | 53.9 | 6.3 | | 0.2 | 0.061 |
| TX-02-129 | TFA | 12.1 | 1.6 | 1.0 | 10.4 | 70.5 | 4.3 | 2.9 | | |
| TX-02-129 | TAG | 12.8 | 3.6 | 2.5 | 22.0 | 53.6 | 5.5 | | 0.3 | 0.106 |
| TX-02-08 | TFA | 17.6 | 2.6 | 5.6 | 17.2 | 51.2 | 5.8 | 3.0 | | |
| TX-02-08 | TAG | 24.4 | 5.9 | 15.8 | 29.3 | 15.8 | 8.8 | | 0.6 | 0.183 |
| TX-02-02 | TFA | 17.9 | 3.1 | 7.2 | 15.5 | 49.6 | 6.7 | 3.1 | | |
| TX-02-02 | TAG | 23.7 | 6.5 | 17.7 | 22.8 | 19.6 | 9.7 | | 0.6 | 0.194 |
| TX-02-11 | TFA | 25.1 | 4.1 | 9.0 | 16.3 | 36.3 | 9.1 | 3.2 | | |
| TX-02-11 | TAG | 33.3 | 6.6 | 13.9 | 20.9 | 16.0 | 9.3 | | 1.1 | 0.341 |
| TX-02-127 | TFA | 11.4 | 1.6 | 0.3 | 8.9 | 75.4 | 2.4 | 3.5 | | |
| TX-02-127 | TAG | 21.0 | 5.8 | 1.4 | 20.6 | 47.4 | 3.9 | | 0.1 | 0.016 |
| TX-02-30 | TFA | 16.4 | 3.1 | 3.7 | 17.1 | 53.8 | 5.9 | 4.0 | | |
| TX-02-30 | TAG | 21.3 | 5.0 | 7.6 | 27.1 | 30.5 | 8.5 | | 0.9 | 0.236 |
| TX-02-19 | TFA | 13.5 | 2.7 | 25.4 | 22.6 | 30.8 | 5.0 | 4.2 | | |
| TX-02-19 | TAG | 14.0 | 3.3 | 34.3 | 27.0 | 16.6 | 4.8 | | 2.3 | 0.548 |
| TX-02-06 | TFA | 24.0 | 4.8 | 14.3 | 19.6 | 29.7 | 7.7 | 4.8 | | |
| TX-02-06 | TAG | 29.7 | 6.9 | 19.2 | 23.0 | 13.4 | 7.7 | | 2.7 | 0.555 |
| TX-02-10 | TFA | 22.0 | 3.3 | 10.3 | 22.7 | 33.7 | 7.9 | 6.3 | | |
| TX-02-10 | TAG | 24.8 | 4.1 | 12.9 | 27.0 | 22.4 | 8.8 | | 3.5 | 0.551 |
| TX-02-38 | TFA | 24.8 | 4.4 | 13.9 | 24.5 | 23.7 | 8.7 | 6.4 | | |
| TX-02-38 | TAG | 21.5 | 5.3 | 8.6 | 25.2 | 39.3 | 0.0 | | 2.5 | 0.392 |

TABLE 20
TFA and TAG levels, fatty acid composition and TTQ in sorghum leaves
transformed with pOIL102 (pZmUbi:WRI1) and pOIL197 (pZmUbi:DGAT and
pZmUbi:Oleosin) during the mature seed setting stage of growth.

| | TAG or | | | | | | | | | |
|---|---|---|---|---|---|---|---|---|---|---|
| Line | TFA | C16:0 | C18:0 | C18:1 | C18:2 | C18:3n3 | Other | TFA | TAG | TTQ |
| TX-02-18 | TFA | 15.6 | 5.5 | 1.1 | 13.2 | 54.3 | 10.3 | 0.8 | | |
| TX-02-18 | TAG | 14.2 | 7.7 | 2.5 | 22.7 | 49.2 | 3.7 | | 0.1 | 0.133 |
| TX-02-31 | TFA | 15.6 | 4.4 | 1.6 | 11.1 | 55.9 | 11.4 | 0.9 | | |
| TX-02-31 | TAG | 12.3 | 6.3 | 3.2 | 19.8 | 56.2 | 2.2 | | 0.2 | 0.163 |
| TX-02-37 | TFA | 14.8 | 4.7 | 1.8 | 10.3 | 57.5 | 10.8 | 1.0 | | |
| TX-02-37 | TAG | 9.6 | 5.8 | 3.2 | 20.6 | 58.6 | 2.1 | | 0.1 | 0.147 |
| TX-02-12 | TFA | 16.4 | 3.8 | 1.7 | 13.0 | 54.8 | 10.2 | 1.0 | | |
| TX-02-12 | TAG | 15.1 | 6.2 | 3.3 | 21.0 | 50.0 | 4.4 | | 0.3 | 0.258 |
| TX-02-29 | TFA | 14.9 | 4.7 | 1.1 | 9.8 | 60.0 | 9.5 | 1.1 | | |
| TX-02-29 | TAG | 14.4 | 12.7 | 2.4 | 17.5 | 50.6 | 2.4 | | 0.1 | 0.125 |
| TX-02-01 | TFA | 14.9 | 4.6 | 1.4 | 10.5 | 59.0 | 9.5 | 1.3 | | |
| TX-02-01 | TAG | 15.8 | 6.4 | 3.1 | 17.3 | 54.3 | 3.1 | | 0.1 | 0.083 |
| TX-02-23 | TFA | 14.3 | 4.6 | 1.4 | 8.2 | 63.5 | 8.0 | 1.3 | | |
| TX-02-23 | TAG | 9.9 | 6.1 | 2.6 | 13.2 | 48.5 | 19.8 | | 0.1 | 0.104 |
| TX-02-09 | TFA | 14.1 | 4.5 | 0.9 | 8.4 | 65.0 | 7.0 | 1.4 | | |
| TX-02-09 | TAG | 16.4 | 11.7 | 2.4 | 14.0 | 51.6 | 3.8 | | 0.1 | 0.052 |
| TX-02-24 | TFA | 15.1 | 4.3 | 0.9 | 11.6 | 59.3 | 8.8 | 1.5 | | |
| TX-02-24 | TAG | 14.5 | 7.4 | 2.3 | 23.8 | 48.0 | 4.1 | | 0.1 | 0.094 |
| TX-02-28 | TFA | 14.3 | 3.5 | 0.7 | 8.6 | 65.9 | 7.0 | 1.5 | | |
| TX-02-28 | TAG | 16.3 | 13.2 | 1.9 | 12.4 | 52.0 | 4.2 | | 0.1 | 0.074 |
| TX-02-34 | TFA | 15.2 | 3.8 | 1.4 | 15.3 | 54.2 | 10.1 | 1.5 | | |
| TX-02-34 | TAG | 13.3 | 5.8 | 2.2 | 22.3 | 47.0 | 9.5 | | 0.5 | 0.347 |
| TX-02-27 | TFA | 14.8 | 2.8 | 0.9 | 8.9 | 67.5 | 5.1 | 1.5 | | |
| TX-02-27 | TAG | 15.9 | 11.9 | 3.5 | 20.2 | 46.5 | 1.9 | | 0.1 | 0.049 |
| TX-02-33 | TFA | 14.6 | 4.1 | 2.4 | 13.3 | 57.2 | 8.4 | 1.5 | | |
| TX-02-33 | TAG | 12.5 | 7.3 | 4.1 | 21.9 | 49.1 | 5.2 | | 0.3 | 0.200 |
| TX-02-07 | TFA | 12.3 | 4.2 | 0.8 | 8.4 | 69.9 | 4.4 | 1.5 | | |
| TX-02-07 | TAG | 10.6 | 5.5 | 2.3 | 17.8 | 60.8 | 2.9 | | 0.1 | 0.042 |
| TX-02-05 | TFA | 15.4 | 6.5 | 7.0 | 21.7 | 39.3 | 10.2 | 1.6 | | |
| TX-02-05 | TAG | 13.1 | 8.3 | 11.4 | 30.1 | 28.9 | 8.3 | | 0.6 | 0.376 |
| TX-02-08 | TFA | 18.4 | 2.8 | 2.5 | 14.4 | 52.5 | 9.5 | 1.9 | | |
| TX-02-08 | TAG | 25.0 | 6.2 | 7.6 | 23.7 | 27.3 | 10.2 | | 0.2 | 0.128 |
| TX-02-127 | TFA | 12.6 | 2.8 | 0.6 | 7.5 | 71.9 | 4.5 | 2.4 | | |
| TX-02-127 | TAG | 11.9 | 5.0 | 2.1 | 14.6 | 63.4 | 2.9 | | 0.1 | 0.026 |
| TX-02-38 | TFA | 41.9 | 14.1 | 19.6 | 8.7 | 1.5 | 14.2 | 3.0 | | |
| TX-02-38 | TAG | 25.3 | 9.9 | 32.5 | 16.1 | 2.7 | 13.4 | | 1.1 | 0.365 |
| TX-02-02 | TFA | 16.5 | 6.8 | 28.2 | 15.1 | 21.2 | 12.2 | 3.5 | | |
| TX-02-02 | TAG | 16.5 | 9.8 | 39.1 | 16.5 | 7.1 | 10.9 | | 1.7 | 0.496 |
| TX-02-06 | TFA | 25.3 | 4.8 | 12.0 | 24.3 | 19.3 | 14.3 | 4.0 | | |
| TX-02-06 | TAG | 27.1 | 6.2 | 14.7 | 27.8 | 12.4 | 11.8 | | 2.6 | 0.658 |
| TX-02-30 | TFA | 17.0 | 4.1 | 6.7 | 20.2 | 43.3 | 8.7 | 4.3 | | |
| TX-02-30 | TAG | 19.6 | 5.8 | 11.4 | 27.4 | 26.1 | 9.7 | | 2.2 | 0.509 |
| TX-02-14 | TFA | 13.3 | 7.3 | 56.1 | 6.2 | 8.8 | 8.3 | 6.1 | | |
| TX-02-14 | TAG | 13.7 | 8.7 | 60.1 | 6.1 | 4.3 | 7.1 | | 4.3 | 0.706 |

TABLE 21
TFA and TAG levels, fatty acid composition and TTQ in pOIL103 +
pOIL197 primary transformants at vegetative setting stage.

| | TFA or | | | | | | | | | |
|---|---|---|---|---|---|---|---|---|---|---|
| Line | TAG | C16:0 | C18:0 | C18:1 | C18:2 | 08:3n3 | Other | TFA | TAG | TTQ |
| TX-03-07 | TFA | 22.6 | 3.3 | 1.3 | 12.7 | 51.8 | 8.4 | 2.4 | | |
| TX-03-07 | TAG | 29.4 | 5.6 | 3.3 | 20.9 | 31.3 | 9.4 | | 0.1 | 0.056 |
| TX-03-02 | TFA | 17.7 | 2.6 | 1.1 | 9.1 | 64.0 | 5.4 | 2.4 | | |
| TX-03-02 | TAG | 20.2 | 5.1 | 2.8 | 16.4 | 47.7 | 7.7 | | 0.2 | 0.079 |
| TX-03-01 | TFA | 16.9 | 2.5 | 1.2 | 8.7 | 65.7 | 4.9 | 2.8 | | |
| TX-03-01 | TAG | 18.8 | 5.4 | 3.3 | 17.3 | 47.7 | 7.5 | | 0.3 | 0.096 |
| TX-03-52 | TFA | 13.8 | 1.4 | 0.8 | 8.9 | 70.6 | 4.5 | 2.9 | | |
| TX-03-52 | TAG | 23.2 | 4.3 | 2.3 | 19.6 | 42.8 | 7.8 | | 0.2 | 0.082 |
| TX-03-47 | TFA | 14.1 | 1.6 | 0.6 | 6.5 | 73.5 | 3.7 | 3.0 | | |
| TX-03-47 | TAG | 20.6 | 3.9 | 3.8 | 18.0 | 48.6 | 5.2 | | 0.1 | 0.023 |
| TX-03-17 | TFA | 15.3 | 1.4 | 0.5 | 7.1 | 72.1 | 3.6 | 3.0 | | |
| TX-03-17 | TAG | 29.4 | 4.0 | 2.0 | 16.8 | 41.6 | 6.3 | | 0.1 | 0.039 |
| TX-03-05 | TFA | 23.2 | 2.0 | 0.6 | 8.1 | 61.2 | 4.9 | 3.0 | | |
| TX-03-05 | TAG | 43.9 | 4.4 | 1.6 | 14.4 | 28.9 | 6.8 | | 0.2 | 0.053 |
| TX-03-53 | TFA | 19.6 | 1.9 | 1.1 | 10.9 | 61.0 | 5.6 | 3.1 | | |
| TX-03-53 | TAG | 35.3 | 3.9 | 3.1 | 20.5 | 30.7 | 6.5 | | 0.3 | 0.082 |
| TX-03-19 | TFA | 20.8 | 1.8 | 0.6 | 9.1 | 63.9 | 3.9 | 3.1 | | |
| TX-03-19 | TAG | 39.9 | 4.4 | 1.8 | 17.2 | 26.9 | 9.8 | | 0.2 | 0.056 |
| TX-03-10 | TFA | 27.8 | 4.3 | 1.1 | 21.0 | 38.0 | 7.8 | 3.1 | | |
| TX-03-10 | TAG | 35.2 | 7.3 | 1.7 | 26.3 | 19.8 | 9.7 | | 1.4 | 0.442 |
| TX-03-48 | TFA | 21.4 | 2.1 | 0.8 | 9.0 | 62.0 | 4.8 | 3.2 | | |
| TX-03-48 | TAG | 39.1 | 4.5 | 2.3 | 15.6 | 31.7 | 6.8 | | 0.2 | 0.062 |
| TX-03-61 | TFA | 16.7 | 1.3 | 1.8 | 17.6 | 57.4 | 5.3 | 3.2 | | |
| TX-03-61 | TAG | 19.0 | 4.6 | 2.9 | 33.9 | 28.9 | 10.7 | | 0.2 | 0.047 |
| TX-03-32 | TFA | 15.6 | 1.5 | 0.7 | 10.7 | 67.3 | 4.1 | 3.2 | | |
| TX-03-32 | TAG | 28.8 | 4.0 | 3.4 | 26.5 | 29.2 | 8.1 | | 0.1 | 0.032 |
| TX-03-40 | TFA | 15.0 | 1.3 | 0.6 | 9.1 | 69.8 | 4.2 | 3.3 | | |
| TX-03-40 | TAG | 27.6 | 3.7 | 2.2 | 25.2 | 32.1 | 9.2 | | 0.2 | 0.057 |
| TX-03-49 | TFA | 17.3 | 1.5 | 0.5 | 8.0 | 68.0 | 4.8 | 3.3 | | |
| TX-03-49 | TAG | 35.0 | 6.9 | 1.9 | 18.4 | 26.4 | 11.3 | | 0.1 | 0.015 |
| TX-03-21 | TFA | 13.1 | 1.3 | 0.6 | 7.8 | 73.7 | 3.5 | 3.3 | | |
| TX-03-21 | TAG | 20.3 | 4.1 | 3.3 | 23.1 | 43.0 | 6.3 | | 0.1 | 0.029 |
| TX-03-62 | TFA | 18.0 | 1.1 | 1.9 | 13.6 | 59.8 | 5.5 | 3.3 | | |
| TX-03-62 | TAG | 26.2 | 4.8 | 5.7 | 30.2 | 24.9 | 8.3 | | 0.2 | 0.051 |
| TX-03-26 | TFA | 14.0 | 1.5 | 0.5 | 7.9 | 72.3 | 3.8 | 3.4 | | |
| TX-03-26 | TAG | 22.8 | 3.8 | 3.2 | 22.8 | 40.5 | 6.9 | | 0.1 | 0.023 |
| TX-03-36 | TFA | 19.7 | 1.6 | 0.8 | 8.9 | 63.7 | 5.2 | 3.5 | | |
| TX-03-36 | TAG | 37.1 | 3.9 | 2.3 | 17.1 | 30.5 | 9.0 | | 0.3 | 0.075 |
| TX-03-50 | TFA | 16.7 | 1.3 | 0.8 | 9.3 | 66.7 | 5.2 | 3.5 | | |
| TX-03-50 | TAG | 35.9 | 3.9 | 4.0 | 21.9 | 25.2 | 9.2 | | 0.1 | 0.026 |
| TX-03-23 | TFA | 19.5 | 1.6 | 0.3 | 6.1 | 67.1 | 5.4 | 3.5 | | |
| TX-03-23 | TAG | 39.0 | 4.3 | 1.2 | 13.9 | 32.7 | 9.0 | | 0.2 | 0.044 |
| TX-03-45 | TFA | 15.0 | 1.6 | 0.3 | 6.2 | 71.9 | 5.0 | 3.5 | | |
| TX-03-45 | TAG | 27.1 | 4.7 | 0.8 | 14.1 | 41.7 | 11.6 | | 0.3 | 0.087 |
| TX-03-34 | TFA | 20.6 | 1.7 | 0.8 | 11.0 | 60.3 | 5.6 | 3.5 | | |
| TX-03-34 | TAG | 36.1 | 3.9 | 2.1 | 21.6 | 27.5 | 8.9 | | 0.2 | 0.068 |
| TX-03-51 | TFA | 12.3 | 1.3 | 0.7 | 9.3 | 72.9 | 3.6 | 3.6 | | |
| TX-03-51 | TAG | 23.8 | 4.8 | 2.6 | 26.7 | 32.2 | 9.9 | | 0.1 | 0.034 |
| TX-03-63 | TFA | 15.7 | 1.3 | 1.8 | 16.9 | 59.7 | 4.7 | 3.7 | | |
| TX-03-63 | TAG | 23.9 | 3.8 | 2.9 | 31.7 | 26.6 | 11.1 | | 0.2 | 0.049 |
| TX-03-41 | TFA | 21.0 | 1.7 | 0.6 | 8.0 | 63.7 | 4.9 | 3.7 | | |
| TX-03-41 | TAG | 44.7 | 3.8 | 1.7 | 15.2 | 27.4 | 7.1 | | 0.2 | 0.067 |
| TX-03-20 | TFA | 10.7 | 1.5 | 0.7 | 9.0 | 74.7 | 3.3 | 3.7 | | |
| TX-03-20 | TAG | 14.1 | 4.0 | 2.3 | 24.1 | 47.3 | 8.2 | | 0.2 | 0.061 |
| TX-03-29 | TFA | 20.3 | 1.9 | 0.9 | 11.0 | 61.2 | 4.7 | 3.7 | | |
| TX-03-29 | TAG | 37.1 | 4.4 | 3.1 | 21.2 | 27.5 | 6.7 | | 0.2 | 0.054 |
| TX-03-25 | TFA | 12.1 | 1.5 | 0.5 | 6.5 | 75.9 | 3.5 | 3.8 | | |
| TX-03-25 | TAG | 17.6 | 7.2 | 2.7 | 16.6 | 48.5 | 7.3 | | 0.1 | 0.030 |
| TX-03-33 | TFA | 24.1 | 2.2 | 0.9 | 13.0 | 53.2 | 6.6 | 3.8 | | |
| TX-03-33 | TAG | 40.6 | 4.3 | 1.7 | 20.9 | 23.3 | 9.1 | | 0.6 | 0.168 |
| TX-03-22 | TFA | 22.3 | 1.7 | 1.2 | 13.8 | 54.5 | 6.5 | 3.9 | | |
| TX-03-22 | TAG | 37.9 | 3.3 | 2.2 | 23.4 | 23.5 | 9.8 | | 1.0 | 0.245 |
| TX-03-46 | TFA | 24.4 | 1.7 | 0.7 | 9.9 | 57.3 | 6.0 | 4.0 | | |
| TX-03-46 | TAG | 45.2 | 3.2 | 1.4 | 17.6 | 24.6 | 8.0 | | 0.6 | 0.148 |
| TX-03-11 | TFA | 25.4 | 2.8 | 1.0 | 20.8 | 42.9 | 7.2 | 4.0 | | |
| TX-03-11 | TAG | 33.4 | 4.8 | 1.5 | 28.8 | 21.6 | 9.9 | | 1.4 | 0.337 |
| TX-03-18 | TFA | 20.8 | 2.7 | 0.9 | 13.9 | 56.2 | 5.5 | 4.1 | | |
| TX-03-18 | TAG | 33.6 | 7.1 | 2.7 | 24.8 | 21.5 | 10.3 | | 0.3 | 0.078 |
| TX-03-57 | TFA | 12.9 | 1.4 | 1.8 | 15.8 | 63.4 | 4.6 | 4.2 | | |
| TX-03-57 | TAG | 14.5 | 2.5 | 7.6 | 41.5 | 24.9 | 9.0 | | 0.5 | 0.127 |
| TX-03-58 | TFA | 13.0 | 1.5 | 1.8 | 15.7 | 63.3 | 4.8 | 4.2 | | |
| TX-03-58 | TAG | 16.4 | 3.4 | 4.9 | 35.3 | 31.2 | 8.8 | | 0.6 | 0.148 |
| TX-03-54 | TFA | 22.8 | 1.9 | 1.0 | 16.4 | 51.2 | 6.8 | 5.0 | | |
| TX-03-54 | TAG | 36.0 | 3.5 | 1.7 | 26.1 | 21.6 | 11.1 | | 1.2 | 0.245 |
| TX-03-28 | TFA | 28.3 | 2.2 | 1.0 | 16.8 | 44.1 | 7.6 | 5.4 | | |
| TX-03-28 | TAG | 40.9 | 3.3 | 1.4 | 23.4 | 22.4 | 8.6 | | 2.3 | 0.434 |
| TX-03-31 | TFA | 22.2 | 2.2 | 2.0 | 25.2 | 41.6 | 6.8 | 5.6 | | |
| TX-03-31 | TAG | 30.9 | 3.6 | 3.0 | 34.7 | 18.5 | 9.3 | | 2.3 | 0.410 |
| TX-03-04 | TFA | 24.3 | 3.4 | 0.6 | 10.5 | 55.4 | 5.8 | 7.0 | | |
| TX-03-04 | TAG | 36.1 | 6.5 | 2.2 | 15.9 | 31.3 | 8.0 | | 0.1 | 0.016 |
| TX-03-08 | TFA | 22.6 | 1.9 | 0.6 | 6.8 | 63.8 | 4.3 | 8.3 | | |
| TX-03-08 | TAG | 46.4 | 4.6 | 4.2 | 11.1 | 26.7 | 7.0 | | 0.1 | 0.017 |

TABLE 22
TFA and TAG levels, fatty acid composition and TTQ in pOIL103 +
pOIL197 primary transformants at boot leaf stage.

| | TFA or | | | | | | | | | |
|---|---|---|---|---|---|---|---|---|---|---|
| Line | TAG | C16:0 | C18:0 | C18:1 | C18:2 | C18:3n3 | Other | TFA | TAG | TTQ |
| TX-03-20 | TFA | 12.2 | 2.6 | 1.7 | 10.3 | 67.5 | 5.7 | 2.1 | | |
| TX-03-20 | TAG | 9.4 | 3.6 | 3.3 | 18.1 | 63.0 | 2.5 | | 0.4 | 0.217 |
| TX-03-54 | TFA | 13.6 | 3.5 | 3.0 | 12.1 | 61.5 | 6.4 | 2.1 | | |
| TX-03-54 | TAG | 14.1 | 6.9 | 7.0 | 22.5 | 43.5 | 6.0 | | 0.4 | 0.207 |
| TX-03-61 | TFA | 23.9 | 3.1 | 1.7 | 19.0 | 43.9 | 8.3 | 2.2 | | |
| TX-03-61 | TAG | 31.4 | 6.6 | 3.4 | 28.3 | 19.6 | 10.8 | | 0.4 | 0.159 |
| TX-03-02 | TFA | 14.9 | 3.0 | 2.8 | 12.1 | 60.6 | 6.6 | 2.2 | | |
| TX-03-02 | TAG | 14.8 | 5.5 | 5.6 | 20.6 | 46.7 | 6.8 | | 0.5 | 0.222 |
| TX-03-53 | TFA | 18.5 | 3.7 | 8.9 | 15.4 | 43.1 | 10.4 | 2.3 | | |
| TX-03-53 | TAG | 20.1 | 6.8 | 16.7 | 24.5 | 23.3 | 8.6 | | 0.6 | 0.275 |
| TX-03-01 | TFA | 13.4 | 3.0 | 3.0 | 12.5 | 61.8 | 6.4 | 2.3 | | |
| TX-03-01 | TAG | 13.9 | 5.5 | 7.5 | 23.0 | 42.6 | 7.4 | | 0.4 | 0.164 |
| TX-03-47 | TFA | 12.8 | 2.1 | 1.6 | 7.5 | 70.7 | 5.3 | 2.4 | | |
| TX-03-47 | TAG | 14.8 | 5.1 | 5.0 | 19.3 | 52.1 | 3.7 | | 0.1 | 0.050 |
| TX-03-07 | TFA | 18.4 | 2.8 | 7.6 | 15.6 | 47.1 | 8.5 | 2.5 | | |
| TX-03-07 | TAG | 25.8 | 6.4 | 18.7 | 25.5 | 15.2 | 8.5 | | 0.3 | 0.127 |
| TX-03-05 | TFA | 21.4 | 2.3 | 1.4 | 9.7 | 59.1 | 6.1 | 2.6 | | |
| TX-03-05 | TAG | 36.4 | 5.6 | 3.9 | 17.1 | 28.4 | 8.6 | | 0.4 | 0.168 |
| TX-03-49 | TFA | 18.1 | 3.7 | 8.2 | 13.2 | 52.0 | 4.9 | 2.6 | | |
| TX-03-49 | TAG | 24.1 | 8.2 | 18.3 | 20.9 | 18.8 | 9.7 | | 0.5 | 0.212 |
| TX-03-34 | TFA | 19.0 | 2.7 | 6.0 | 15.4 | 50.6 | 6.4 | 2.6 | | |
| TX-03-34 | TAG | 24.8 | 10.5 | 10.9 | 23.9 | 20.6 | 9.3 | | 0.8 | 0.287 |
| TX-03-32 | TFA | 18.2 | 2.2 | 1.6 | 12.4 | 60.2 | 5.4 | 2.8 | | |
| TX-03-32 | TAG | 20.8 | 14.6 | 3.2 | 21.4 | 31.5 | 8.5 | | 0.6 | 0.204 |
| TX-03-04 | TFA | 18.8 | 3.1 | 5.8 | 13.4 | 50.3 | 8.6 | 2.9 | | |
| TX-03-04 | TAG | 26.7 | 7.5 | 14.6 | 23.1 | 19.0 | 9.1 | | 0.3 | 0.118 |
| TX-03-23 | TFA | 18.9 | 1.7 | 1.0 | 7.9 | 63.2 | 7.3 | 2.9 | | |
| TX-03-23 | TAG | 25.0 | 4.6 | 2.5 | 18.1 | 39.6 | 10.2 | | 0.2 | 0.070 |
| TX-03-25 | TFA | 14.5 | 1.8 | 0.4 | 6.4 | 73.5 | 3.4 | 3.0 | | |
| TX-03-25 | TAG | 20.3 | 5.1 | 1.0 | 12.3 | 53.6 | 7.7 | | 0.3 | 0.110 |
| TX-03-18 | TFA | 21.1 | 2.9 | 1.2 | 17.8 | 46.3 | 10.7 | 3.0 | | |
| TX-03-18 | TAG | 22.6 | 5.9 | 4.5 | 31.1 | 22.6 | 13.3 | | 0.4 | 0.143 |
| TX-03-50 | TFA | 16.5 | 2.6 | 6.1 | 12.9 | 53.9 | 8.0 | 3.0 | | |
| TX-03-50 | TAG | 20.2 | 19.9 | 12.9 | 19.6 | 20.6 | 6.8 | | 0.7 | 0.217 |
| TX-03-60 | TFA | 20.2 | 2.9 | 0.8 | 14.1 | 55.7 | 6.2 | 3.1 | | |
| TX-03-60 | TAG | 30.5 | 6.2 | 1.6 | 21.6 | 30.2 | 9.9 | | 0.6 | 0.202 |
| TX-03-21 | TFA | 12.3 | 1.7 | 0.5 | 6.8 | 74.4 | 4.4 | 3.2 | | |
| TX-03-21 | TAG | 16.1 | 4.7 | 1.6 | 13.1 | 57.0 | 7.5 | | 0.2 | 0.067 |
| TX-03-40 | TFA | 17.1 | 1.4 | 0.4 | 8.0 | 68.2 | 4.9 | 3.2 | | |
| TX-03-40 | TAG | 34.5 | 4.4 | 0.9 | 14.5 | 39.8 | 5.9 | | 0.4 | 0.112 |
| TX-03-62 | TFA | 25.3 | 2.9 | 1.7 | 14.7 | 47.9 | 7.6 | 3.3 | | |
| TX-03-62 | TAG | 40.3 | 5.6 | 3.5 | 22.3 | 18.7 | 9.5 | | 0.6 | 0.171 |
| TX-03-36 | TFA | 19.5 | 2.0 | 2.0 | 11.4 | 58.3 | 6.8 | 3.5 | | |
| TX-03-36 | TAG | 31.2 | 4.0 | 4.4 | 20.0 | 29.4 | 11.0 | | 0.6 | 0.160 |
| TX-03-63 | TFA | 25.4 | 3.6 | 2.6 | 18.2 | 42.0 | 8.2 | 3.5 | | |
| TX-03-63 | TAG | 33.1 | 6.1 | 3.8 | 24.9 | 21.6 | 10.4 | | 1.4 | 0.383 |
| TX-03-45 | TFA | 16.4 | 1.4 | 0.5 | 8.1 | 69.1 | 4.5 | 3.5 | | |
| TX-03-45 | TAG | 30.8 | 4.6 | 1.4 | 16.2 | 40.7 | 6.3 | | 0.2 | 0.058 |
| TX-03-17 | TFA | 14.2 | 1.8 | 0.8 | 6.9 | 71.2 | 5.2 | 3.6 | | |
| TX-03-17 | TAG | 18.7 | 4.5 | 2.2 | 13.5 | 52.8 | 8.3 | | 0.4 | 0.120 |
| TX-03-57 | TFA | 18.7 | 3.4 | 1.5 | 13.8 | 55.8 | 6.8 | 3.6 | | |
| TX-03-57 | TAG | 23.4 | 6.3 | 3.0 | 21.0 | 36.2 | 10.1 | | 1.2 | 0.330 |
| TX-03-11 | TFA | 29.1 | 6.4 | 2.1 | 22.4 | 33.0 | 7.1 | 3.6 | | |
| TX-03-11 | TAG | 30.6 | 8.5 | 2.8 | 27.0 | 19.7 | 11.4 | | 1.9 | 0.510 |
| TX-03-48 | TFA | 27.1 | 3.7 | 3.7 | 20.6 | 37.2 | 7.6 | 3.7 | | |
| TX-03-48 | TAG | 31.2 | 5.0 | 5.5 | 27.1 | 23.0 | 8.1 | | 2.1 | 0.569 |
| TX-03-29 | TFA | 20.1 | 2.3 | 1.7 | 13.4 | 55.5 | 7.1 | 3.7 | | |
| TX-03-29 | TAG | 33.0 | 5.0 | 4.1 | 24.3 | 26.4 | 7.2 | | 0.4 | 0.104 |
| TX-03-26 | TFA | 15.3 | 1.6 | 0.4 | 5.9 | 71.3 | 5.5 | 3.9 | | |
| TX-03-26 | TAG | 25.2 | 4.6 | 1.7 | 13.3 | 49.7 | 5.5 | | 0.3 | 0.074 |
| TX-03-10 | TFA | 28.6 | 6.8 | 2.1 | 21.8 | 33.0 | 7.7 | 3.9 | | |
| TX-03-10 | TAG | 31.0 | 8.5 | 2.9 | 26.7 | 18.6 | 12.2 | | 1.9 | 0.491 |
| TX-03-58 | TFA | 16.3 | 2.6 | 1.3 | 14.5 | 60.3 | 5.0 | 4.1 | | |
| TX-03-58 | TAG | 20.4 | 5.2 | 2.8 | 24.3 | 39.2 | 8.2 | | 1.1 | 0.278 |
| TX-03-08 | TFA | 19.8 | 2.0 | 0.7 | 6.6 | 64.9 | 5.9 | 4.1 | | |
| TX-03-08 | TAG | 34.8 | 5.2 | 2.7 | 14.3 | 34.5 | 8.5 | | 0.2 | 0.051 |
| TX-03-33 | TFA | 27.4 | 2.4 | 1.5 | 16.3 | 46.0 | 6.4 | 4.2 | | |
| TX-03-33 | TAG | 39.2 | 5.4 | 2.3 | 21.9 | 20.8 | 10.5 | | 1.6 | 0.386 |
| TX-03-22 | TFA | 19.8 | 2.8 | 3.1 | 11.8 | 53.4 | 9.1 | 4.2 | | |
| TX-03-22 | TAG | 28.4 | 5.3 | 5.4 | 19.4 | 38.3 | 3.2 | | 3.2 | 0.287 |
| TX-03-41 | TFA | 18.1 | 2.6 | 3.1 | 11.1 | 58.0 | 7.1 | 4.8 | | |
| TX-03-41 | TAG | 27.8 | 6.0 | 6.8 | 19.3 | 34.9 | 5.3 | | 0.7 | 0.139 |
| TX-03-46 | TFA | 24.6 | 2.0 | 0.6 | 7.9 | 57.4 | 7.4 | 4.9 | | |
| TX-03-46 | TAG | 44.7 | 4.2 | 1.3 | 13.4 | 31.4 | 5.0 | | 1.1 | 0.220 |
| TX-03-28 | TFA | 28.5 | 2.1 | 1.3 | 23.4 | 33.7 | 11.0 | 6.2 | | |
| TX-03-28 | TAG | 36.0 | 2.9 | 3.1 | 29.6 | 18.5 | 10.0 | | 3.7 | 0.596 |
| TX-03-31 | TFA | 33.4 | 2.9 | 4.3 | 28.6 | 25.5 | 5.5 | 8.3 | | |
| TX-03-31 | TAG | 38.0 | 3.6 | 4.9 | 30.6 | 14.8 | 8.1 | | 6.6 | 0.789 |

TABLE 23
TFA and TAG levels, fatty acid composition and TTQ in pOIL103 +
pOIL197 primary transformants at mature seed setting stage.

| | TFA or | | | | | | | | | |
|---|---|---|---|---|---|---|---|---|---|---|
| Line | TAG | C16:0 | C18:0 | C18:1 | C18:2 | C18:3n3 | Other | TFA | TAG | TTQ |
| TX-03-52 | TFA | 15.5 | 6.7 | 4.3 | 14.3 | 48.7 | 10.6 | 1.2 | | |
| TX-03-52 | TAG | 12.7 | 7.9 | 8.3 | 21.4 | 41.1 | 8.7 | | 0.4 | 0.315 |
| TX-03-51 | TFA | 15.6 | 6.4 | 4.3 | 13.6 | 52.0 | 8.0 | 1.5 | | |
| TX-03-51 | TAG | 13.7 | 8.9 | 8.2 | 18.6 | 41.2 | 9.5 | | 0.4 | 0.296 |
| TX-03-07 | TFA | 20.6 | 4.2 | 13.1 | 18.1 | 32.1 | 11.9 | 1.6 | | |
| TX-03-07 | TAG | 25.5 | 7.8 | 23.7 | 24.5 | 9.3 | 9.1 | | 0.4 | 0.227 |
| TX-03-04 | TFA | 23.9 | 3.7 | 4.0 | 16.5 | 38.8 | 13.1 | 1.7 | | |
| TX-03-04 | TAG | 35.3 | 6.1 | 9.5 | 24.6 | 14.7 | 9.8 | | 0.2 | 0.110 |
| TX-03-54 | TFA | 16.6 | 5.0 | 6.7 | 16.1 | 45.8 | 9.9 | 1.7 | | |
| TX-03-54 | TAG | 16.6 | 7.2 | 12.4 | 22.7 | 34.2 | 6.9 | | 0.4 | 0.245 |
| TX-03-21 | TFA | 14.4 | 4.2 | 1.0 | 10.0 | 62.7 | 7.7 | 1.8 | | |
| TX-03-21 | TAG | 12.8 | 6.6 | 1.9 | 16.5 | 55.4 | 6.7 | | 0.2 | 0.133 |
| TX-03-08 | TFA | 19.3 | 3.6 | 7.1 | 16.4 | 45.3 | 8.3 | 1.9 | | |
| TX-03-08 | TAG | 23.5 | 7.3 | 16.2 | 24.6 | 19.6 | 8.7 | | 0.4 | 0.213 |
| TX-03-02 | TFA | 16.4 | 4.8 | 7.5 | 22.0 | 39.7 | 9.5 | 1.9 | | |
| TX-03-02 | TAG | 15.1 | 6.4 | 14.0 | 30.3 | 25.6 | 8.7 | | 0.6 | 0.334 |
| TX-03-34 | TFA | 24.2 | 4.9 | 5.2 | 18.2 | 32.4 | 15.2 | 2.0 | | |
| TX-03-34 | TAG | 27.1 | 7.3 | 8.6 | 26.6 | 18.1 | 12.3 | | 0.6 | 0.298 |
| TX-03-17 | TFA | 16.9 | 4.2 | 2.0 | 10.6 | 55.2 | 11.1 | 2.2 | | |
| TX-03-17 | TAG | 19.7 | 6.7 | 3.7 | 18.4 | 41.4 | 10.0 | | 0.2 | 0.107 |
| TX-03-26 | TFA | 19.3 | 3.4 | 0.8 | 9.9 | 57.6 | 9.1 | 2.2 | | |
| TX-03-26 | TAG | 23.9 | 6.7 | 2.0 | 18.2 | 39.3 | 9.9 | | 0.3 | 0.129 |
| TX-03-32 | TFA | 23.2 | 3.9 | 1.7 | 15.5 | 44.5 | 11.2 | 2.3 | | |
| TX-03-32 | TAG | 29.0 | 6.3 | 3.8 | 24.8 | 25.6 | 10.6 | | 0.5 | 0.206 |
| TX-03-41 | TFA | 19.7 | 4.9 | 6.3 | 21.7 | 36.5 | 10.9 | 2.3 | | |
| TX-03-41 | TAG | 20.9 | 7.6 | 11.6 | 29.3 | 20.3 | 10.5 | | 0.8 | 0.331 |
| TX-03-49 | TFA | 21.1 | 5.7 | 14.9 | 19.3 | 27.5 | 11.4 | 2.3 | | |
| TX-03-49 | TAG | 22.6 | 8.3 | 23.7 | 24.7 | 12.0 | 8.8 | | 0.9 | 0.375 |
| TX-03-25 | TFA | 17.9 | 3.2 | 0.6 | 8.7 | 62.6 | 7.1 | 2.6 | | |
| TX-03-25 | TAG | 21.9 | 6.3 | 1.5 | 14.2 | 47.7 | 8.3 | | 0.4 | 0.149 |
| TX-03-40 | TFA | 20.8 | 3.4 | 0.8 | 5.8 | 59.7 | 9.6 | 2.7 | | |
| TX-03-40 | TAG | 27.6 | 6.3 | 0.4 | 8.6 | 46.3 | 10.8 | | 0.7 | 0.238 |
| TX-03-36 | TFA | 22.8 | 4.2 | 2.6 | 15.7 | 45.2 | 9.5 | 2.9 | | |
| TX-03-36 | TAG | 27.1 | 7.1 | 5.0 | 22.9 | 25.1 | 12.9 | | 0.8 | 0.282 |
| TX-03-10 | TFA | 28.4 | 5.3 | 1.7 | 21.5 | 30.3 | 12.7 | 3.3 | | |
| TX-03-10 | TAG | 32.7 | 7.8 | 2.3 | 25.2 | 18.6 | 13.3 | | 1.9 | 0.570 |
| TX-03-46 | TFA | 27.5 | 3.7 | 1.7 | 12.2 | 41.4 | 13.4 | 3.7 | | |
| TX-03-46 | TAG | 36.4 | 5.1 | 1.8 | 15.1 | 29.1 | 12.4 | | 1.6 | 0.420 |
| TX-03-48 | TFA | 26.7 | 5.0 | 6.5 | 24.7 | 24.7 | 12.3 | 4.5 | | |
| TX-03-48 | TAG | 28.6 | 6.1 | 7.6 | 28.2 | 17.6 | 12.0 | | 3.0 | 0.679 |

TABLE 24
TFA and TAG levels, fatty acid composition and TTQ in pOIL104 (pSSU:WRI1) + pOIL197
(pZmUbi:DGAT and pZmUbi:Oleosin) primary transformants at vegetative setting stage.

| | TFA or | | | | | | | | | |
|---|---|---|---|---|---|---|---|---|---|---|
| Line | TFA | C16:0 | C18:0 | C18:1 | C18:2 | C18:3n3 | Other | TFA | TAG | TTQ |
| TX-04-02 | TFA | 12.6 | 1.7 | 1.2 | 11.3 | 68.4 | 4.7 | 2.7 | | |
| TX-04-02 | TAG | 19.2 | 8.2 | 3.9 | 29.4 | 35.1 | 4.2 | | 0.0 | 0.008 |
| TX-04-25 | TFA | 12.4 | 1.5 | 0.7 | 8.1 | 72.7 | 4.7 | 3.1 | | |
| TX-04-25 | TAG | 21.9 | 11.7 | 5.3 | 19.8 | 38.3 | 3.0 | | 0.1 | 0.020 |
| TX-04-11 | TFA | 13.5 | 2.0 | 0.5 | 7.2 | 70.8 | 6.0 | 3.2 | | |
| TX-04-11 | TAG | 17.4 | 3.9 | 3.3 | 13.6 | 55.2 | 6.5 | | 0.1 | 0.019 |
| TX-04-27 | TFA | 13.1 | 1.7 | 1.5 | 9.8 | 67.8 | 6.0 | 3.2 | | |
| TX-04-27 | TAG | 18.2 | 3.6 | 2.6 | 24.1 | 44.6 | 6.8 | | 0.4 | 0.134 |
| TX-04-24 | TFA | 12.9 | 1.9 | 0.6 | 7.6 | 72.2 | 4.8 | 3.3 | | |
| TX-04-24 | TAG | 24.2 | 11.4 | 3.7 | 17.3 | 40.5 | 3.1 | | 0.1 | 0.017 |
| TX-04-16 | TFA | 13.0 | 2.9 | 0.8 | 8.9 | 70.0 | 4.5 | 3.4 | | |
| TX-04-16 | TAG | 22.5 | 8.1 | 4.9 | 22.3 | 37.5 | 4.6 | | 0.1 | 0.023 |
| TX-04-30 | TFA | 13.0 | 1.6 | 1.3 | 8.7 | 70.2 | 5.2 | 3.5 | | |
| TX-04-30 | TAG | 18.5 | 3.8 | 2.6 | 22.5 | 46.9 | 5.8 | | 0.3 | 0.072 |
| TX-04-10 | TFA | 18.9 | 2.7 | 1.0 | 8.3 | 60.8 | 8.3 | 3.5 | | |
| TX-04-10 | TAG | 34.0 | 5.5 | 3.2 | 17.7 | 30.0 | 9.5 | | 0.1 | 0.034 |
| TX-04-13 | TFA | 13.0 | 2.0 | 0.7 | 6.4 | 72.7 | 5.1 | 3.5 | | |
| TX-04-13 | TAG | 16.2 | 5.0 | 3.6 | 14.8 | 55.9 | 4.5 | | 0.1 | 0.017 |
| TX-04-19 | TFA | 19.4 | 2.2 | 0.6 | 9.9 | 62.7 | 5.2 | 3.5 | | |
| TX-04-19 | TAG | 30.2 | 4.3 | 3.1 | 24.8 | 33.2 | 4.4 | | 0.1 | 0.025 |
| TX-04-06 | TFA | 11.6 | 1.6 | 1.0 | 11.2 | 69.6 | 5.1 | 3.6 | | |
| TX-04-06 | TAG | 14.1 | 4.5 | 3.4 | 27.9 | 40.6 | 9.4 | | 0.1 | 0.036 |
| TX-04-14 | TFA | 12.9 | 3.3 | 3.3 | 8.6 | 65.7 | 6.1 | 3.6 | | |
| TX-04-14 | TAG | 20.3 | 8.9 | 4.0 | 21.4 | 40.2 | 5.3 | | 0.1 | 0.024 |
| TX-04-04 | TFA | 10.7 | 1.8 | 0.6 | 8.0 | 74.3 | 4.6 | 3.9 | | |
| TX-04-04 | TAG | 11.0 | 10.1 | 3.8 | 17.2 | 56.3 | 1.7 | | 0.2 | 0.044 |
| TX-04-15 | TFA | 17.4 | 2.4 | 1.1 | 12.2 | 60.2 | 6.5 | 4.0 | | |
| TX-04-15 | TAG | 28.5 | 5.6 | 2.2 | 23.3 | 31.6 | 8.9 | | 0.6 | 0.160 |
| TX-04-08 | TFA | 17.5 | 1.9 | 1.9 | 15.1 | 57.5 | 6.1 | 4.0 | | |
| TX-04-08 | TAG | 28.0 | 4.5 | 4.8 | 29.5 | 23.5 | 9.7 | | 0.5 | 0.130 |
| TX-04-22 | TFA | 13.1 | 3.5 | 1.4 | 12.9 | 63.9 | 5.3 | 4.1 | | |
| TX-04-22 | TAG | 17.1 | 7.8 | 4.3 | 29.5 | 33.3 | 8.0 | | 0.6 | 0.150 |
| TX-04-09 | TFA | 13.7 | 2.4 | 4.1 | 20.4 | 53.8 | 5.5 | 4.1 | | |
| TX-04-09 | TAG | 17.4 | 5.3 | 9.5 | 38.1 | 20.6 | 9.1 | | 0.6 | 0.158 |

[1169] A more detailed lipid analysis was performed on the TX-03-8 plant (boot leaf stage) and TX-03-28 (vegetative stage) (FIG. 13). A wildtype (flowering) and empty vector transformant (vegetative stage) served as controls for comparison. Despite differences in plant age at the time of sampling, leaves of both transgenic plants contained increased levels of TFA and total polar lipids. TX-03-28 contained up to 3.4% TAG at vegetative stage while TAG levels in TX-03-8 were only slightly increased at boot leaf stage. Both transgenic lines exhibited surprisingly large increases in the amounts of the galactolipids MGDG and DGDG. Increases in different polar lipid classes, the phospholipids PC, PG, PE, PA, PS, PI, were less pronounced but still significant (FIG. 13B). Further investigation by LC-MS revealed increased levels of C18:0, C18:2^{Δ9,12} and C18:3^{Δ9,12,15} in the free fatty acid fraction of both transgenic lines, suggesting a flux through PC via acyl editing prior to lipolysis. DAG molecular species in transgenic leaf tissues that were increased included 34:2 (likely C16:0/C18:2^{Δ9,12}), 34:3 (likely C16:0/C18:3^{Δ9,12,15}), 36:4 (likely C18:2^{Δ9,12}/C18:2^{Δ9,12} and C18:1^{Δ9}/C18:3^{Δ9,12,15}) and 36:5 (likely C18:2^{Δ9,12}/c18:3^{Δ9,12,15}). The enrichment of poly-unsaturated fatty acids in the DAG fraction matched with the TAG composition and suggested PC-derived DAG as the precursor to TAG synthesis. Similar changes in PC and PE molecular species were observed in both transgenic plants while PI species mainly had C16:0 and C18 fatty acids. PG molecular species were highly enriched in C16:0, reflecting their plastidial synthesis via the prokaryotic pathway. Galactolipids in both transgenic lines were mainly derived from the eukaryotic lipid pathway i.e. enriched in C18 fatty acids. The major MGDG molecular species was 36:6 (likely C18:3^{Δ9,12,15}/C18:3^{Δ9,12,95}), serving as a substrate for DGDG 36:6 synthesis. A second major DGDG species in both transgenic lines, 34:3 (likely C16:0/C18:3^{Δ9,12,15}), was also likely from extra-plastidial origin. TAG molecular species consisting of C16/C16/C18 (48:X), C16/C16/C18 (50:X) and C16/C18/C18 (52:x) were increased in transgenic leaf tissues. Interestingly, 54:8 (likely C18:2^{Δ9,12}/C18:3^{Δ9,12,15}/c18:3^{Δ9,12,15}) and 54:9 (likely C18:3^{Δ9,12,15}/C18:3^{Δ9,12,15}/C18:3^{Δ9,12,15}) were reduced compared to the negative controls. Taken together, these results suggest increased flux of acyl chains into TAG via PC in the transgenic lines whilst galactolipid biosynthesis mainly occurred via the eukaryotic pathway. These data also led the inventors to understand that reduction of TGD activity or increases in PDCT and/or CPT in the plants in addition to the present transgenes would likely enhance the TFA and TAG levels.

[1170] The chimeric DNA constructs for Agrobacterium-mediated transformation are used to transform Zea mays (corn) as described by Gould et al. (1991). Briefly, shoot apex explants are co-cultivated with transgenic Agrobacterium for two days before being transferred onto a MS salt media containing kanamycin and carbenicillin. After several rounds of sub-culture, transformed shoots and roots spontaneously form and are transplanted to soil. The constructs are similarly used to transform Hordeum vulgare (barley) and Avena sativa (oats) using transformation methods known for these species. Briefly, for barley, the Agrobacterium cultures are used to transform cells in immature embryos of barley (cv. Golden Promise) according to published methods (Tingay et al., 1997; Bartlett et al., 2008) with some modifications in that embryos between 1.5 and 2.5 mm in length are isolated from immature caryopses and the embryonic axes removed. The resulting explants are co-cultivated for 2-3 days with the transgenic Agrobacterium and then cultured in the dark for 4-6 weeks on media containing timentin and hygromycin to generate embryogenic callus before being moved to transition media in low light conditions for two weeks. Calli are then transferred to regeneration media to allow for the regeneration of shoots and roots before transfer of the regenerated plantlets to soil. Transformed plants are obtained and grown to maturity in the glasshouse.

[1171] The chimeric DNA constructs for Agrobacterium-mediated transformation are used to transform Zea mays (corn) as described by Gould et al. (1991). Briefly, shoot apex explants are co-cultivated with transgenic Agrobacterium for two days before being transferred onto a MS salt media containing kanamycin and carbenicillin. After several rounds of sub-culture, transformed shoots and roots spontaneously form and are transplanted to soil. The constructs are similarly used to transform Hordeum vulgare (barley) and Avena sativa (oats) using transformation methods known for these species. Briefly, for barley, the Agrobacterium cultures are used to transform cells in immature embryos of barley (cv. Golden Promise) according to published methods (Tingay et al., 1997; Bartlett et al., 2008) with some modifications in that embryos between 1.5 and 2.5 mm in length are isolated from immature caryopses and the embryonic axes removed. The resulting explants are co-cultivated for 2-3 days with the transgenic Agrobacterium and then cultured in the dark for 4-6 weeks on media containing timentin and hygromycin to generate embryogenic callus before being moved to transition media in low light conditions for two weeks. Calli are then transferred to regeneration media to allow for the regeneration of shoots and roots before transfer of the regenerated plantlets to soil. Transformed plants are obtained and grown to maturity in the glasshouse.

### Example 6. Modifying Traits in Dicotyledonous Plants

[1172] Oil content in the dicotyledonous plant species Trifolium repens (clover), a legume commonly used as a pasture species, was increased by expressing the combination of WRI1, DGAT and Oleosin genes in vegetative parts. The construct pJP3502 was used to transform T. repens by Agrobacterium-mediated transformation (Larkin et al., 1996). Briefly, the genetic construct pJP3502 was introduced into A. tumefaciens via a standard electroporation procedure. The binary vector also contained a 35S:NptII selectable marker gene within the T-DNA. The transformed Agrobacterium cells were grown on solid LB media supplemented with kanamycin (50 mg/L) and rifampicin (25 mg/L) and incubated at 28° C. for two days. A single colony was used to initiate a fresh culture. Following 48 hours vigorous culture, the Agrobacterium cells was used to treat T. repens (cv. Haifa) cotyledons that had been dissected from imbibed seed as described by Larkin et al. (1996). Following co-cultivation for three days the explants were exposed to 25 mg/L kanamycin to select transformed shoots and then transferred to rooting medium to form roots, before transfer to soil.

[1173] Six transformed plants containing the T-DNA from pJP3502 were obtained and transferred to soil in the glasshouse. Increased oil content was observed in the non-seed tissue of some of the plants, with one plant showing greater than 4-fold increase in TAG levels in the leaves. Such plants are useful as animal feed, for example by growing the plants in pastures, providing feed with an increased energy content per unit weight (energy density) and resulting in increased growth rates in the animals.

[1174] The construct pJP3502 is also used to transform other leguminous plants such as alfalfa (Medicago sativa) and barrel medic (Medicago truncatula) by the method of Wright et al. (2006) to obtain transgenic plants which have increased TAG content in vegetative parts. The transgenic plants are useful as pasture species or as hay or silage as a source of feed for animals such as, for example, cattle, sheep and horses, providing an increased energy density in the feed.

### Example 7. Modification of Plastidial GPAT Expression

### Over-Expression of Plastidial GPAT in Plant Cells

[1175] A number of experiments were performed to test the hypothesis that the presence of a highly active 16:3 prokaryotic pathway in a plant (i.e. a so-called 16:3 plant) would provide much lower TAG levels in vegetative tissues upon introduction of the gene combination on pJP3502, relative to 18:3 plants. These experiments are described in the following Examples. Initially, the inventors tested whether the high level TAG accumulation observed in transgenic N. benthamiana could be disrupted by over-expression of a plastidial GPAT, increasing the flux in the prokaryotic pathway.

[1176] A coding region for expression of the Arabidopsis thaliana plastidial GPAT, ATS1 (Nishida et al., 1993), was amplified by RT-PCR from A. thaliana total RNA and cloned as an EcoRI-PstI fragment into the binary expression vector pJP3343 under the control of the 35S promoter to produce the constitutive expression vector pOIL098. The effect of over-expressing a plastidial GPAT in a high oil leaf background is determined by infiltration of the chimeric vector pOIL098 into high oil leaf tissue. The high oil leaf tissue is generated either by co-infiltration of WRI1 and DGAT binary expression vectors (Example 1) or by infiltrating pOIL098 into leaves of a Nicotiana plant stably transformed with the T-DNA from pJP3502 or another high oil vector. Oil content is expected to be reduced in the infiltrated leaf spots co-expressing the ATS1-encoding gene. This is determined by analysing TFA and TAG as proportions of sample dry mass. This is also determined by observing incorporation of labelled acetate into fatty acids produced by microsomes or leaf lysates made from infiltrated leaf spots.

Oil Accumulation in a Plastidial GPAT Mutant of Arabidopsis thaliana

[1177] The ats1 mutant of A. thaliana has a disruptive mutation in the gene encoding plastidial GPAT which reduced plastidial GPAT activity to a level of only 3.8% of the wild-type (Kunst et al., 1988). Non-seed TAG accumulation levels, at least in leaves, stems and roots, in both parental and ats1 mutant A. thaliana is tested and compared. The T-DNA of the pJP3502 construct for over-expression of the combination of genes encoding WRI1, DGAT and Oleosin is introduced by transformation into plants of both genotypes. The gene combination in the T-DNA of pJP3502 increases fatty acid synthesis in both plant backgrounds. However, the accumulation of TAG in the ats1 mutant is expected to be significantly higher on average than in the transgenic plants derived from the wild-type (parental) genotype due to the reduction in plastidial GPAT activity and therefore the reduced flux of fatty acids into the plastidial prokaryotic pathway. The ratio of the fatty acids C16:3 to C18:3 is significantly reduced in leaves of the ats1 mutant, both transformed and untransformed.

### Silencing the Gene Encoding Plastidial GPAT in Plant Cells

[1178] In addition to genetically modifying a plant by introducing a mutation in a gene encoding a plastidial GPAT, the flux of fatty acids through the prokaryotic 16:3 pathway can be reduced and thereby increase oil content in vegetative parts by silencing the plastidial GPAT. This is demonstrated by producing a transgenic cassette having a constitutive or leaf-specific promoter expressing an RNA hairpin corresponding to a region of the gene encoding the plastidial GPAT from the selected species. As an example, an RNAi hairpin expression cassette is produced using the 581 bp SalI-EcoRV fragment of the A. thaliana plastidial GPAT cDNA sequence (NM_179407, SEQ ID NO:177). A region of any gene encoding a plastidial GPAT which has a high degree of sequence identity to the nucleotide sequence of NM_179407 can also be used to construct a gene for expression of a hairpin RNA for silencing an endogenous plastidial GPAT gene. A hpRNAi construct containing a 732 bp fragment (SEQ ID NO:210) of the N. benthamiana plastidial GPAT flanked by SmaI and KasI unique sites was designed for stable transformation into N. tabacum. The synthesized N. benthamiana plastidial GPAT fragment was subcloned into the SmaI-KasI sites of pJP3303, resulting in pOIL113. It is expected that reducing plastidial fatty acid retention will result in an increase in TAG accumulation, particularly when combined with a “Push” component such as over-expression of a transcription factor such as WRI1, or by a “Pull” component such as a DGAT or PDAT, and/or reduced SDP1 or TGD activity.

[1179] Inactivation of the gene encoding a plastidial GPAT or indeed any gene can be achieved using CRISPR/Cas9 methods. For example, inactivation of the gene encoding A. thaliana plastidial GPAT (Accession No. NM_179407) can be carried out by CRISPR/Cas9/sgRNA-mediated gene disruption and subsequent mutagenesis by non homologous end joining (NHEJ) DNA repair. Before targeted DNA cleavage, Cas9 stimulates DNA strand separation and allows a sgRNA to hybridize with a specific 20 nt sequence in the targeted gene. This positions the target DNA into the active site of Cas9 in proper orientation in relation to a PAM (tandem guanosine nucleotides) binding site. This positioning allows separate nuclease domains of Cas9 to independently cleave each strand of the target DNA sequence at a point 3-nt upstream of the PAM site. The double-strand break then undergoes error-prone NHEJ DNA repair during which deletions or insertions of a few nucleotides occur and result in inactivation of the plastidial GPAT gene. SgRNA sequences targeting the A. thaliana GPAT gene are identified and selected through the use of the CRISPRP web tool (Xie et al., 2014). The 20nt target sequence can be any 20nt sequence within the target gene, including within non-coding regions of the gene such as a promoter or intron, provided that it is a specific sequence within the genome. The sequence can be inserted into a binary vector containing the CRISPR/Cas9/sgRNA expression cassette and kanamycin plant selectable marker (Jiang et al., 2013) and transformed into the plant cells by Agrobacterium-mediated transformation. Transgenic T1 plants can be screened for mutations in the plastidial GPAT gene by PCR amplification and DNA sequencing.

### Example 8. Increasing Expression of Thioesterase in Plant Cells

[1180] De novo fatty acid synthesis takes place in the plastids of eukaryotic cells where the fatty acids are synthesized while bound to acyl carrier protein as acyl-ACP conjugates. Following chain elongation to C16:0 and C18:0 acyl groups and then desaturation to C18:1 while linked to ACP, the fatty acids are cleaved from the ACP by thioesterases and enter the eukaryotic pathway by export from the plastids and transport to the ER where they participate in membrane and storage lipid biogenesis. In chloroplasts, the export process has two steps: firstly, acyl chains are released as free fatty acids by the enzymatic activity of acyl-ACP thioesterases (fatty acyl thioesterase; FAT), secondly by reaction with CoA to form acyl-CoA esters which is catalysed by long chain acyl-CoA synthetases (LACS). A. thaliana contains 3 fatty acyl thioesterases which can be distinguished based on their acyl chain specificity. FATA1 and FATA2 preferentially hydrolyze unsaturated acyl-ACPs while saturated acyl-ACP chains are typically cleaved by FATB.

[1181] To explore the effect upon total fatty acid content, TAG content, and fatty acid composition of the co-expression of a thioesterase and genes encoding the WRI1 and/or DGAT polypeptides, chimeric genes were made for each of the three A. thaliana thioesterases by insertion of the coding regions into the pJP3343 binary expression vector for transient expression in N. benthamiana leaf cells from the 35S promoter. Protein coding regions for the A. thaliana FATA1 (Accession No. NP_189147.1, SEQ ID NO:193) and FATA2 (Accession No. NP_193041.1, SEQ ID NO:194) thioesterases were amplified from silique cDNA using primers containing EcoRI and PstI sites and subsequently cloned into pJP3343 using the same restriction sites. The resulting expression vectors were designated pOIL079 and pOIL080, respectively. The protein coding region of the A. thaliana FATB gene (Accession No. NP_172327.1, SEQ ID NO:195) was amplified using primers containing NotI and SacI flanking sites and cloned into the corresponding restriction sites of pJP3343, resulting in pOIL081. Constructs pOIL079, pOIL080 and pOIL081 are infiltrated into N. benthamiana leaf tissue, either individually or in combination with constructs containing the genes for the A. thaliana WRI1 transcription factor (AtWRI1) (pJP3414) and/or DGAT1 acyltransferase (AtDGAT1) (pJP3352). For comparison, chimeric genes encoding the Cocos nucifera FatB1 (CnFATB1) (pJP3630), C. nucifera FatB2 (CnFATB2) (pJP3629) were introduced into N. benthamiana leaf tissue in parallel with the Arabidopsis thioesterases, to compare the effect of the FatB polypeptides having MCFA specificity to the Arabidopsis thioesterases which do not have MCFA specificity. All of the infiltrations included a chimeric gene for expression of the p19 silencing suppressor as described in Example 1. The negative control infiltrated only the p19 T-DNA.

[1182] A synergistic effect was observed between thioesterase expression and WRI1 and/or DGAT over-expression on TAG levels in N. benthamiana leaves. Expression of the thioesterase genes without the WRI1 or DGAT genes significantly increased TAG levels above the low level in the negative control (p19 alone). For example, expression of the coconut FATB2 thioesterase resulted in an 8.2-fold increase in TAG levels in the leaves compared to the negative control. Co-expression of the A. thaliana WRI1 transcription factor with each of the thioesterases further increased TAG levels compared to the AtWRI1 control. Co-expression of each of the coconut thioesterases CnFATB1 and CnFATB2 with WRI1 resulted in higher TAG levels than each of the three A. thaliana thioesterases with WRI1. Interestingly, the converse was observed when the A. thaliana DGAT1 acyltransferase was co-expressed in combination with a thioesterase and WRI1. This suggested a better match in acyl-chain specificity of the A. thaliana thioesterases and the A. thaliana DGAT1 acyltransferase, resulting in a greater flux of acyl-chains from the acyl-ACP into TAG. The non-MCFA thioesterases were also considerably more effective in elevating the percentage of oleic acid in the total fatty acid content in the leaves. Co-expression of the AtWRI1, AtDGAT1 and AtFATA2 resulted in the greatest level of TAG in the leaves, providing a level which was 1.6-fold greater than when AtWRI1 and AtDGAT1 were co-expressed without the thioesterase. These experiments confirmed the synergistic increase in oil synthesis and accumulation when both WRI1 and DGAT were co-expressed as well as showing the further synergistic increase obtained by adding a thioesterase to the combination.

[1183] Three different binary expression vectors were constructed to test the effect of co-expression of genes encoding WRI1, DGAT1 and FATA on TAG levels and fatty acid composition in stably transformed N. tabacum leaves. The vector pOIL121 contained an SSU::AtWRI1 gene for expression of AtWRI1 from the SSU promoter, a 35S::AtDGAT1 gene for expression of AtDGAT1 from the 35S promoter, and an enTCUP2::AtFATA2 gene for expression of AtFATA2 from the enTCUP2 promoter which is a constitutive promoter. These genetic constructs were derived from pOIL38 by first digesting the DNA with NotI to remove the gene coding for the S. indicum oleosin. The protein coding region of the A. thaliana FATA2 gene was amplified and flanked with Nod sites using pOIL80 DNA as template. This fragment was then inserted into the NotI site of pOIL38. pOIL121 then served as a parent vector for pOIL122 which contained an additional enTCUP2::SDP1 hairpin RNA cassette for RNAi-mediated silencing of the endogenous SDP1 gene in the transgenic plants. To do this, the entire N. benthamiana SDP1 hairpin cassette was isolated from pOIL51 (Example 2) as an SfoI-SmaI fragment and cloned into the SfoI site of pOIL121, producing pOIL122 (FIG. 14). A third vector, pOIL123, containing the SSU::WRI1 and 35S::DGAT1 genes and the enTCUP2::SDP1 hairpin RNA gene was obtained in a similar way by cloning the enTCUP2::SDP1 hairpin RNA cassette as a SfoI-SmaI fragment into the SfoI site of pOIL36.

[1184] In summary, the vectors contained the gene combinations:

[1185] pOIL121: SSU::AtWRI1, 35S::AtDGAT1, enTCUP2::AtFATA2.

[1186] pOIL122: SSU::AtWRI1, 35S::AtDGAT1, enTCUP2::AtFATA2, enTCUP2::SDP1 hairpin.

[1187] pOIL123: SSU::AtWRI1, 35S::AtDGAT1, enTCUP2::SDP1 hairpin.

[1188] The three constructs were each used to produce transformed N. tabacum plants (cultivar Wi38) by Agrobacterium-mediated transformation. Co-expression of the A. thaliana FATA2 thioesterase or silencing of the endogenous SDP1 TAG lipase in combination with AtWRI1 and AtDGAT1 expression each resulted in further elevated TAG levels compared to expression of AtWRI1 and AtDGAT1 in the absence of both of the thioesterase gene and the SDP1-silencing gene. The greatest TAG yields were obtained using pOIL122 by the combined action of all four chimeric genes.

[1189] It is noted that N. benthamiana is an 18:3 plant. The same constructs pOIL079, pOIL080 and pOIL081 are used to transform A. thaliana, a 16:3 plant.

[1190] The inventors conceived of the model that increasing plastidial fatty acid export such as by increased fatty acyl thioesterase activity reduces acyl-ACP accumulation in the plastids, thereby increasing fatty acid biosynthesis as a result of reduced feedback inhibition on the acetyl-CoA carboxylase (ACCase) (Andre et al., 2012; Moreno-Perez et al., 2012). Thioesterase over-expression increases export of acyl chains from the plastids into the ER, thereby providing an efficient link between so-called ‘Push’ and ‘Pull’ metabolic engineering strategies.

### Example 9. The Effect of Different Transcription Factor Polypeptides on Plant Traits

[1191] Previously reported experiments with WRI1 and DGAT (Vanhercke et al., 2013) used a synthetic gene encoding A. thaliana AtWRI1 (Accession No. AAP80382.1) and a synthetic gene encoding AtDGAT1, also from A. thaliana (Accession No. AAF19262; SEQ ID NO: 1). To compare other WRI polypeptides with AtWRI1 for their ability to combine with DGAT to increase oil content, other WRI coding sequences were identified and used to generate constructs for expression in N. benthamiana leaves. Nucleotide sequences encoding the A. thaliana WRI3 (Accession No. AAM91814.1, SEQ ID NO:196) and WRI4 (Accession No. NP_178088.2, SEQ ID NO:197) transcription factors (To et al., 2012) were synthesized and inserted as EcoRI fragments into pJP3343 under the control of the 35S promoter. The resulting binary expression vectors were designated pOIL027 and pOIL028, respectively. The coding sequence for the oat (Avena sativa) WRI1 (AsWRI1, SEQ ID NO:198) was PCR amplified from a vector provided by Prof. Sten Stymne (Swedish University of Agricultural Sciences) using flanking primers containing additional EcoRI sites. The amplified fragment was inserted into pJP3343 resulting in pOIL055. A WRI1 candidate sequence from S. bicolor (Accession No. XP_002450194.1, SEQ ID NO:199) was identified by a BLASTp search on the NCBI server using the Zea mays WRI1 amino acid sequence (Accession No. NP_001137064.1, SEQ ID NO:200) as query. The protein coding region of the S. bicolor WRI1 gene (SbWRI1) was synthesized and inserted as an EcoRI fragment into pJP3343, yielding pOIL056. A gene candidate encoding a WRI1 was identified from the Chinese tallow (Triadica sebifera; TsWRI1, SEQ ID NO:201) transcriptome (Uday et al., submitted). The protein coding region was synthesized and inserted as an EcoRI fragment into pJP3343 resulting in pOIL070. The pJP3414 and pJP3352 binary vectors containing the coding sequences for expression of the A. thaliana WRI1 and DGAT1 polypeptides were as described by Vanhercke et al. (2013).

[1192] Plasmids containing the various WRI coding sequences were introduced into N. benthamiana leaf tissue for transient expression using a gene encoding the p19 viral suppressor protein in all inoculations as described in Example 1. The genes encoding the WRI polypeptides were either tested alone or in combination with the DGAT1 acyltransferase gene, the latter to provide greater TAG biosynthesis and accumulation. The positive control in this experiment was the combination of the genes encoding A. thaliana WRI1 transcription factor and AtDGAT1. All infiltrations were done in triplicate using three different plants and TAG levels were analyzed as described in Example 1. Expression of most of the individual WRI polypeptides in the absence of exogenously added DGAT1 resulted in increased, yet still low, TAG levels (<0.23% on dry weight basis) in infiltrated leaf spots, compared to the control which had only the p19 construct (FIG. 15). The exception was TsWRI1 which, by itself, did not appear to increase TAG levels significantly. In addition, differences in TAG levels produced by expression of the different WRI transcription factors on their own were not great. Both AsWRI1 and SbWRI1 yielded TAG levels similar to AtWRI1 on its own. Analysis of the TAG fatty acid composition revealed only minor changes except for increased C18:149 levels from expression of AtWRI3 in the infiltrated leaf tissues (Table 25).

[1193] In contrast, differences in TAG yields from expression of the different WRI polypeptides were more pronounced upon co-expression with the AtDGAT1 acyltransferase. This again demonstrated the synergistic effect of WRI1 and DGAT co-expression on TAG biosynthesis in infiltrated N. benthamiana leaf tissue, as reported by Vanhercke et al. (2013). Intermediate TAG levels were observed upon co-expression of DGAT1 with AtWRI3, AtWRI4 and TsWRI1 expressing vectors while levels obtained with the AsWRI1 and AtWRI1 were significantly lower. In a result that could not have been predicted beforehand, the highest TAG yields were obtained with co-expression of DGAT with SbWRI1, even though the assay was done in dicotyledonous cells. TAG fatty acid composition analysis revealed increased levels of C18:1^{Δ9} and decreased levels of C18:3^{Δ9,12,15} (ALA) in the case of SbWRI1, AsWRI1 and the AtWRI1 positive control. Unlike AtWRI1, however, expression of AsWRI1 and SbWRI1 both displayed increased C16:0 levels compared to the p19 negative control. Interestingly, AtWRI3 infiltrated leaf samples exhibited a distinct TAG profile with C18:1^{Δ9} being enriched while C16:0 and ALA were only slightly affected.

[1194] This experiment showed that the S. bicolor WRI1 transcription factor, SbWRI1, was superior to AtWRI1 when co-expressed with DGAT to increase TAG levels in vegetative plant parts. The inventors also concluded that a transcription factor, for example a WRI1, from a monocotyledonous plant could function well in a dicotyledonous plant cell, indeed might even have superior activity compared to a corresponding transcription factor from a dicotyledonous plant. Likewise, a transcription factor from a dicotyledonous plant could function well in a monocotyledonous plant cell.

TABLE 25
TAG fatty acid composition in N. benthamiana leaf samples infiltrated with different chimeric genes for expression of WRI (n = 3).
All samples were also infiltrated with the P19 construct. The TAG samples also contained 0.1-0.4% C14:0; 0.5-1.2% C16:3 and; 0.1-0.7% C18:1Δ11.

| Infiltrated | | | | | | | | | | |
|---|---|---|---|---|---|---|---|---|---|---|
| genes | C16:0 | C16:1 | C18:0 | C18:1 | C18:2 | C18:3n3 | C20:0 | C20:1 | C22:0 | C24:0 |
| Control (P19) | 33.6 ± 4.7 | 0.5 ± 0.4 | 8.9 ± 2.2 | 4.7 ± 0.6 | 16.9 ± 1.0 | 32.2 ± 7.8 | 1.1 ± 0.2 | 0.8 ± 1.5 | 0.0 | 0.0 |
| WRI1 | 35.5 ± 3.4 | 0.7 ± 0.2 | 5.2 ± 0.8 | 5.4 ± 1.3 | 17.1 ± 1.0 | 33.1 ± 2.7 | 0.8 ± 0.1 | 0.5 ± 0.6 | 0.3 ± 0.0 | 0.0 |
| WRI3 | 27.3 ± 1.6 | 0.9 ± 0.2 | 4.8 ± 0.3 | 10.2 ± 1.5 | 16.1 ± 1.0 | 37.8 ± 1.2 | 0.8 ± 0.1 | 0.6 ± 0.7 | 0.1 ± 0.2 | 0.0 |
| WRI4 | 30.1 ± 0.4 | 1.0 ± 0.4 | 5.2 ± 0.8 | 4.6 ± 0.6 | 17.2 ± 0.4 | 38.1 ± 1.6 | 0.8 ± 0.1 | 1.3 ± 1.3 | 0.0 | 0.0 |
| AsWRI | 35.7 ± 3.0 | 1.7 ± 0.4 | 5.3 ± 0.7 | 6.5 ± 0.3 | 15.4 ± 0.4 | 31.6 ± 1.6 | 0.8 ± 0.1 | 0.4 ± 0.7 | 0.3 ± 0.1 | 0.0 |
| SbWRI | 37.4 ± 0.8 | 1.9 ± 0.3 | 4.8 ± 0.3 | 7.0 ± 1.2 | 15.2 ± 0.3 | 30.8 ± 0.3 | 0.8 ± 0.1 | 0.4 ± 0.6 | 0.3 ± 0.0 | 0.0 |
| TsWRI | 34.5 ± 4.8 | 0.0 | 9.4 ± 8.2 | 5.9 ± 1.7 | 16.0 ± 0.7 | 29.3 ± 12.4 | 0.0 | n.d. | 0.0 | 0.0 |
| Control (P19) | 31.0 ± 2.1 | 0.9 ± 0.1 | 8.7 ± 1.3 | 8.0 ± 2.3 | 24.9 ± 1.5 | 22.1 ± 4.7 | 2.0 ± 0.1 | 0.0 | 0.6 ± 0.6 | 0.2 ± 0.4 |
| WRI1 + DGAT | 27.7 ± 0.1 | 0.3 ± 0.0 | 7.0 ± 0.1 | 17.2 ± 0.7 | 27.9 ± 0.9 | 14.7 ± 0.3 | 2.4 ± 0.2 | 0.3 ± 0.0 | 1.1 ± 0.1 | 0.8 ± 0.2 |
| WRI3 + DGAT | 30.0 ± 0.8 | 0.6 ± 0.1 | 5.9 ± 0.4 | 13.9 ± 2.9 | 21.5 ± 1.1 | 21.3 ± 0.8 | 2.8 ± 0.1 | 0.2 ± 0.0 | 1.8 ± 0.1 | 1.0 ± 0.2 |
| WRI4 + DGAT | 27.0 ± 0.5 | 0.2 ± 0.1 | 8.5 ± 0.2 | 5.8 ± 0.7 | 23.9 ± 0.8 | 25.2 ± 1.3 | 3.5 ± 0.1 | 0.2 ± 0.0 | 2.1 ± 0.2 | 1.7 ± 0.2 |
| AsWRI + DGAT | 33.8 ± 0.5 | 1.1 ± 0.1 | 5.5 ± 0.9 | 12.2 ± 1.6 | 26.0 ± 1.9 | 16.3 ± 1.3 | 2.2 ± 0.2 | 0.2 ± 0.0 | 1.2 ± 0.1 | 0.8 ± 0.1 |
| SbWRI + DGAT | 34.6 ± 0.5 | 1.3 ± 0.1 | 5.6 ± 0.4 | 13.9 ± 1.6 | 23.6 ± 1.3 | 15.8 ± 0.6 | 2.2 ± 0.1 | 0.2 ± 0.0 | 1.2 ± 0.1 | 0.9 ± 0.1 |
| TsWRI + DGAT | 25.4 ± 0.5 | 0.2 ± 0.0 | 9.4 ± 0.1 | 7.7 ± 1.0 | 27.0 ± 1.3 | 22.1 ± 2.4 | 3.6 ± 0.2 | 0.2 ± 0.0 | 1.8 ± 0.2 | 1.3 ± 0.2 |

### Use of Other Transcription Factors

[1195] Genetic constructs were prepared for expression of each of 14 different transcription factors in plant cells to test their ability to function for increasing TAG levels in combination with other genes involved in TAG biosynthesis and accumulation. These transcription factors were candidates as alternatives for WRI1 or for addition to combinations including one or more of WRI1, LEC1 and LEC2 transcription factors for use in plant cells, particularly in vegetative plant parts. Their selection was largely based on their reported involvement in embryogenesis (reviewed in Baud and Lepiniec (2010), and Ikeda et al. (2006)), similar to LEC2. Experiments were therefore carried out to assay their function, using the N. benthamiana expression system (Example 1), as follows.

[1196] Nucleotide sequences of the protein coding regions of the following transcription factors were codon optimized for expression in N. benthamiana and N. tabacum, synthesized and subcloned as NotI-SacI fragments into the respective sites of pJP3343: A. thaliana FUS3 (pOIL164) (Luerssen et al., 1998; Accession number AAC35247; SEQ ID NO:160), A. thaliana LEC1L (pOIL165) (Kwong et al. 2003; Accession number AAN15924; SEQ ID NO:157), A. thaliana LEC1 (pOIL166) (Lotan et al., 1998; Accession number AAC39488; SEQ ID NO:149), G. max MYB73 (pOIL167) (Liu et al., 2014; Accession number ABH02868; SEQ ID NO:212), A. thaliana bZIP53 (pOIL168) (Alonso et al., 2009; Accession number AAM14360; SEQ ID NO:213), A. thaliana AGL15 (pOIL169) (Zheng et al., 2009; Accession number NP_196883; SEQ ID NO:214), A. thaliana MYB118 (Accession number AAS58517; pOIL170; SEQ ID NO:215), MYB115 (Wang et al., 2002; Accession number AAS10103; pOIL171; SEQ ID NO:216), A. thaliana TANMEI (pOIL172) (Yamagishi et al., 2005; Accession number BAE44475; SEQ ID NO:217), A. thaliana WUS (pOIL173) (Laux et al., 1996; Accession number NP_565429; SEQ ID NO:218), A. thaliana BBM (pOIL174) (Boutilier et al., 2002; Accession number AAM33893, SEQ ID NO:145), B. napus GFR2a1 (Accession number AFB74090; pOIL177; SEQ ID NO:219) and GFR2a2 (Accession number AFB74089; pOIL178; SEQ ID NO:220) (Liu et al. (2012)). In addition, a codon optimized version of the A. thaliana PHR1 transcription factor involved in adaptation to high light phosphate starvation conditions was similarly subcloned into pJP3343 (pOIL189) (Nilsson et al (2012); Accession number AAN72198; SEQ ID NO:221). These transcription factors are summarised in Table 26.

[1197] As a screening assay to determine the function of these transcription factors, the genetic constructs and a gene encoding DGAT1 were co-infiltrated into N. benthamiana leaf cells as described in Example 1, either with or without a gene encoding WRI1. Total lipid content and fatty acid composition of the leaf cells were analysed 5 days post-infiltration. Among the various embryogenic transcription factors tested, only overexpression of FUS3 resulted in significantly increased TAG levels in N. benthamiana leaf tissue when compared to DGAT and DGAT1+WRI1 control infiltrations (Table 27).

TABLE 26
Additional transcription factors and the
genetic constructs for their expression

| | Transcription | | Length | Accession |
|---|---|---|---|---|
| Plasmid | factor | Species | (amino acid) | number |
| pOIL164 | FUS3 | A. thaliana | 312 | AAC35247 |
| pOIL165 | LEC1L | A. thaliana | 234 | AAN15924 |
| pOIL166 | LEC1 | A. thaliana | 208 | AAC39488 |
| pOIL167 | MYB73 | G. max | 74 | ABH02868 |
| pOIL168 | bZIP53 | A. thaliana | 146 | AAM14360 |
| pOIL169 | AGL15 | A. thaliana | 268 | NP_196883 |
| pOIL170 | MYB118 | A. thaliana | 437 | AAS58517 |
| pOIL171 | MYB115 | A. thaliana | 359 | AAS10103 |
| pOIL172 | TANMEI | A. thaliana | 386 | BAE44475 |
| pOIL173 | WUS | A. thaliana | 292 | NP_565429 |
| pOIL174 | BBM | A. thaliana | 584 | AAM33803 |
| pOIL177 | GFR2a1 | B. napus | 453 | AFB74090 |
| pOIL178 | GFR2a2 | B. napus | 461 | AFB74089 |
| pOIL189 | PHR1 | A. thaliana | 409 | AAN72198 |

TABLE 27
TAG level (% leaf dry weight) and fatty acid profile of infiltrated N. benthamiana leaves.

| | C16:0 | C16:1 | C18:0 | C18:1 | C18:2 | C18:3 | TAG |
|---|---|---|---|---|---|---|---|
| P19 | 27.1 ± 1.5 | 0.3 ± 0.1 | 9.6 ± 1.7 | 4.4 ± 1.2 | 22.4 ± 4.0 | 30.5 ± 0.9 | 0.0 |
| P19 + DGAT1 | 26.3 ± 1.0 | 0.1 ± 0.0 | 10.7 ± 0.6 | 3.7 ± 0.7 | 26.1 ± 1.6 | 26.4 ± 1.4 | 0.2 ± 0.0 |
| P19 + DGAT1 + FUS3 | 24.1 ± 1.0 | 0.1 ± 0.0 | 6.3 ± 0.4 | 5.2 ± 1.6 | 27.9 ± 1.8 | 30.0 ± 1.8 | 0.6 ± 0.1 |
| P19 + DGAT1 + LEC1L | 26.0 ± 1.4 | 0.1 ± 0.0 | 10.3 ± 0.8 | 3.9 ± 1.0 | 26.6 ± 2.1 | 26.4 ± 0.7 | 0.2 ± 0.0 |
| P19 | 30.3 ± 0.7 | 0.0 | 12.4 ± 0.7 | 6.8 ± 0.9 | 22.9 ± 0.2 | 26.0 ± 0.9 | 0.0 |
| P19 + DGAT1 | 25.8 ± 1.1 | 0.0 | 10.1 ± 0.4 | 4.4 ± 0.9 | 26.1 ± 1.3 | 26.2 ± 1.4 | 0.2 ± 0.0 |
| P19 + DGAT1 + WRI1 | 22.7 ± 0.9 | 0.0 | 10.1 ± 0.4 | 14.9 ± 0.5 | 27.9 ± 1.3 | 18.5 ± 0.8 | 0.3 ± 0.1 |
| P19 + DGAT1 + FUS3 | 23.9 ± 0.7 | 0.2 ± 0.1 | 7.6 ± 0.4 | 5.3 ± 0.7 | 29.1 ± 0.8 | 26.8 ± 0.7 | 0.4 ± 0.1 |
| P19 + DGAT1 + LEC1 | 24.9 ± 0.4 | 0.1 ± 0.2 | 11.1 ± 0.2 | 4.0 ± 0.1 | 25.9 ± 0.5 | 26.1 ± 0.6 | 0.1 ± 0.0 |
| P19 + DGAT1 + MYB73 | 25.8 ± 0.3 | 0.0 | 10.9 ± 0.7 | 4.3 ± 1.0 | 26.2 ± 0.8 | 25.2 ± 1.8 | 0.1 ± 0.0 |
| P19 | 34.2 ± 4.9 | 0.0 | 10.6 ± 3.1 | 8.3 ± 4.1 | 19.5 ± 1.4 | 23.2 ± 0.8 | 0.1 ± 0.1 |
| P19 + DGAT1 | 27.7 ± 0.1 | 0.3 ± 0.1 | 9.9 ± 1.1 | 4.2 ± 0.3 | 26.4 ± 1.8 | 22.5 ± 0.4 | 0.2 ± 0.1 |
| P19 + DGAT1 + WRI1 | 24.8 ± 1.0 | 0.2 ± 0.0 | 8.8 ± 1.0 | 14.7 ± 0.6 | 27.6 ± 1.0 | 17.2 ± 0.3 | 0.4 ± 0.1 |
| P19 + DGAT1 + bZIP53 | 29.3 ± 0.8 | 0.1 ± 0.2 | 8.7 ± 0.4 | 2.9 ± 0.3 | 22.0 ± 0.5 | 25.9 ± 0.5 | 0.1 ± 0.1 |
| P19 + DGAT1 + AGL15 | 29.2 ± 1.4 | 0.2 ± 0.0 | 4.9 ± 0.9 | 7.0 ± 1.9 | 19.8 ± 0.8 | 30.0 ± 1.3 | 0.3 ± 0.1 |
| P19 + DGAT1 + MYB118 | 31.6 ± 1.7 | 0.2 ± 0.1 | 5.8 ± 1.2 | 4.8 ± 0.8 | 20.7 ± 0.3 | 28.2 ± 1.6 | 0.2 ± 0.1 |
| P19 | 27.4 ± 1.2 | 0.0 | 6.9 ± 1.0 | 4.8 ± 2.6 | 20.0 ± 1.5 | 39.0 ± 4.1 | 0.1 ± 0.0 |
| P19 + DGAT1 | 26.0 ± 1.1 | 0.0 | 8.0 ± 0.6 | 4.2 ± 1.6 | 22.3 ± 2.4 | 33.9 ± 4.3 | 0.2 ± 0.0 |
| P19 + DGAT1 + WRI1 | 23.4 ± 0.8 | 0.1 ± 0.1 | 8.5 ± 0.6 | 17.0 ± 2.4 | 23.3 ± 1.8 | 23.3 ± 4.3 | 0.5 ± 0.1 |
| P19 + DGAT1 + MYB115 | 26.3 ± 0.4 | 0.1 ± 0.1 | 6.6 ± 0.3 | 2.8 ± 0.4 | 22.5 ± 1.8 | 35.7 ± 2.9 | 0.2 ± 0.0 |
| P19 + DGAT1 + TANMEI | 25.6 ± 0.9 | 0.1 ± 0.2 | 8.5 ± 1.2 | 2.6 ± 0.5 | 21.9 ± 2.0 | 35.3 ± 3.8 | 0.2 ± 0.0 |
| P19 + DGAT1 + WUS | 24.3 ± 0.9 | 0.1 ± 0.1 | 5.5 ± 0.6 | 1.7 ± 0.2 | 16.8 ± 1.6 | 47.9 ± 3.3 | 0.2 ± 0.0 |
| P19 | 30.5 ± 1.3 | 0.0 | 8.1 ± 0.9 | 8.2 ± 6.0 | 21.8 ± 1.2 | 28.3 ± 7.3 | 0.1 ± 0.1 |
| P19 + DGAT1 + WRI1 | 25.9 ± 1.7 | 0.2 ± 0.0 | 8.3 ± 0.7 | 19.9 ± 2.8 | 24.5 ± 1.1 | 16.0 ± 0.6 | 0.8 ± 0.1 |
| P19 + DGAT1 + WRI1 + BBM | 27.7 ± 0.7 | 0.2 ± 0.0 | 6.7 ± 0.2 | 21.2 ± 0.7 | 19.8 ± 0.5 | 18.5 ± 0.6 | 0.5 ± 0.1 |
| P19 + DGAT1 + WRI1 + GFR2a1 | 29.2 ± 1.3 | 0.4 ± 0.0 | 6.1 ± 0.1 | 12.9 ± 1.5 | 24.3 ± 0.4 | 20.9 ± 0.5 | 0.4 ± 0.1 |
| P19 + DGAT1 + WRI1 + GFR2a2 | 29.9 ± 2.4 | 0.4 ± 0.1 | 5.5 ± 0.6 | 13.5 ± 2.7 | 23.0 ± 0.5 | 21.3 ± 1.2 | 0.5 ± 0.1 |
| P19 + DGAT1 + WRI1 + PHR1 | 26.2 ± 0.3 | 0.2 ± 0.0 | 4.9 ± 0.0 | 7.6 ± 0.2 | 19.2 ± 0.3 | 36.0 ± 0.7 | 0.3 ± 0.0 |
| P19 | 32.0 ± 1.9 | 1.6 ± 2.7 | 11.1 ± 2.7 | 5.5 ± 2.2 | 23.3 ± 1.1 | 25.4 ± 3.3 | 0.0 |
| P19 + DGAT1 + WRI1 | 27.5 ± 1.2 | 0.7 ± 0.8 | 6.8 ± 0.4 | 16.6 ± 2.1 | 26.7 ± 0.8 | 16.5 ± 0.3 | 1.2 ± 0.2 |
| P19 + DGAT1 + WRI1 + FUS3 | 23.6 ± 1.1 | 2.1 ± 3.5 | 6.5 ± 0.5 | 13.3 ± 0.9 | 32.1 ± 2.6 | 15.6 ± 1.5 | 1.6 ± 0.1 |

[1198] For stable transformation of plants using genes encoding the alternative transcription factors, the following binary constructs are made. The genes for expression of the transcription factors use either the SSU promoter or the SAG12 promoter. Over-expression of embryogenic transcription factors such as LEC1 and LEC2 has been shown to induce a variety of pleotropic effects, undesirable in the present context, including somatic embryogenesis (Feeney et al. (2012); Santos-Mendoza et al. (2005); Stone et al. (2008); Stone et al. (2001); Shen et al. (2010)). To minimize possible negative impact on plant development and biomass yield, tissue or developmental-stage specific promoters are preferred over constitutive promoters to drive the ectopic expression of master regulators of embryogenesis.

### Example 10. Stem-Specific Expression of a Gene Encoding a Transcription Factor

[1199] Leaves of N. tabacum plants expressing transgenes encoding WRI1, DGAT and Oleosin contain about 16% TAG at seed setting stage of development. However, the TAG levels were much lower in stems (1%) and roots (1.4%) of the plants (Vanhercke et al., 2014). The inventors considered whether the lower TAG levels in stems and roots were due to poor promoter activity of the Rubisco SSU promoter used to express the gene encoding WRI1 in the transgenic plants. The DGAT transgene in the T-DNA of pJP3502 was expressed by the CaMV35S promoter which is expressed more strongly in stems and roots and therefore was unlikely to be the limiting factor for TAG accumulation in stems and roots.

[1200] In an attempt to increase TAG biosynthesis in stem tissue, a construct was designed in which the gene encoding WRI1 was placed under the control of an A. thaliana SDP1 promoter. A 3.156 kb synthetic DNA fragment was synthesized comprising 1.5 kb of the A. thaliana SDP1 promoter (SEQ ID NO: 175) (Kelly et al., 2013), followed by the coding region for the A. thaliana WRI1 polypeptide and the G. max lectin terminator/polyadenylation region. This fragment was inserted between the SacI and NotI sites of pJP3303. The resulting vector was designated pOIL050, which was then used to transform cells from the N. tabacum plants homozygous for the T-DNA from pJP3502 by Agrobacterium-mediated transformation. Transgenic plants were selected for hygromycin resistance and a total of 86 independent transgenic plants were grown to maturity in the glasshouse. Samples were taken from transgenic leaf and stem tissue at seed setting stage and contain increased TAG levels compared to the N. tabacum parental plants transformed with pJP3502.

### Example 11. Effect of Oil Body Protein Expression on Plant Traits

[1201] N. tabacum plants transformed with the T-DNA of pJP3502 and expressing transgenes encoding A. thaliana WRI1, DGAT1 and S. indicum Oleosin had increased TAG levels in vegetative tissues. As shown in Example 2 above, when the endogenous gene encoding SDP1 TAG lipase was silenced in those plants, the leaf TAG levels further increased, which indicated to the inventors that substantial TAG turnover was occurring in the plants that retained SDP1 activity. Therefore, the level of expression of the transgenes in the plants was determined. While Northern hybridisation blotting confirmed strong WRI1 and DGAT1 expression and some oleosin mRNA expression, expression analysis by digital PCR and qRT-PCR detected only very low levels of oleosin transcripts. The expression analysis revealed that the gene encoding the Oleosin was poorly expressed compared to the WRI1 and DGAT1 transgenes. From these experiments, the inventors concluded that the oil bodies in the leaf tissue were not completely protected from TAG breakdown because of inadequate production of Oleosin protein when encoded by the T-DNA in pJP3502. To improve stable accumulation of TAG throughout plant development, several pJP3502 modifications were designed in which the Oleosin gene was substituted. These modified constructs were as follows.
[1202] 1. pJP3502 contains a gene (SEQ ID NO:176 provides the sequence of its complement) encoding the S. indicum oleosin which was poorly expressed. That gene has an internal UBQ10 intron which might be reducing the expression level. To test this, a 502 bp synthetic DNA fragment containing the S. indicum oleosin gene and lacking the internal UBQ10 intron was synthesized and inserted into pJP3502 as a NotI fragment, to substitute the oleosin gene containing the intron in pJP3502. The resultant plasmid was designated pOIL040.
[1203] 2. The Rubisco small subunit (SSU) promoter driving expression of the oleosin gene in pJP3502 was replaced by the constitutive enTCUP2 promoter. To this end, a 2321 bp fragment containing the enTCUP2 promoter, Oleosin protein coding region, G. max lectin terminator/polyadenylation region and the first 643 bp of the downstream SSU promoter driving wri1 expression was synthesized and subcloned into the AscI and SpeI sites of pJP3502 resulting in pOIL038.
[1204] 3. A similar strategy was followed for the expression of an engineered version of the S. indicum oleosin gene containing 6 introduced cysteine residues (o3-3) under the control of the enTCUP2 promoter (Winichayakul et al., 2013). A 2298 bp fragment containing the enTCUP2 promoter, Oleosin o3-3 protein coding region, G. max lectin terminator/polyadenylation region and the first 643 bp of the downstream SSU promoter driving wri1 expression was synthesized and subcloned into the AscI and SpeI sites of pJP3502 resulting in pOIL037.
[1205] 4. The NotI sites flanking the S. indicum oleosin gene in pJP3502 were used to exchange the protein coding region for one encoding peanut Oleosin3 (Accession No. AAU21501.1) (Parthibane et al., 2012a; Parthibane et al., 2012b). A 528 bp fragment containing the oleosin3 gene, flanked by NotI sites, was synthesized and subcloned into the respective site of pJP3502. The resulting vector was designated pOIL041.
[1206] 5. Similarly, a 1077 bp NotI flanked fragment containing the gene coding for the A. thaliana steroleosin (Arab-1) (Accession No. AAM10215.1) (Jolivet et al., 2014) was synthesized and subcloned into the NotI site of pJP3502, resulting in pOIL043.
[1207] 6. The Nannochloropsis oceanic lipid droplet surface protein (LDSP) (Accession No. AFB75402.1) (Vieler et al., 2012) was synthesized as a 504 bp NotI-flanked fragment and subcloned into the NotI site of pJP3502, yielding pOIL044.
[1208] 7. Finally, the A. thaliana caleosin (CLO3) (Accession No. 022788.1) (Shimada et al., 2014) was synthesized as a 612 bp NotI flanked fragment and subcloned into pJP3502, resulting in pOIL042.

[1209] Each of these constructs was introduced into N. benthamiana leaf cells as described in Example 1. Transient expression of both pJP3502 and pOIL040 in N. benthamiana leaf tissue resulted in elevated TAG levels and similar changes in the TAG fatty acid profile but pOIL040 increased the TAG level more (1.3% compared to 0.9%). Each of the constructs pOIL037, pOIL038, pOIL041, pOIL042 and pOIL043 were used to stably transform N. tabacum plants (cultivar W38) by Agrobacterium-mediated methods. Transgenic plants were selected on the basis of kanamycin resistance and are grown to maturity in the glasshouse. Samples are taken from transgenic leaf tissue at different stages during plant development and contain increased TAG levels compared to wild-type N. tabacum and N. tabacum plants transformed with pJP3502.

Cloning and Characterisation of LDAP Polypeptides from Sapium sebifera

[1210] Oleosins are not highly expressed in non-seed oil accumulating plant tissues such as the mesocarp of olive, oil palm, and avocado (Murphy, 2012). Instead, lipid droplet associated proteins (LDAP) have been identified in these tissues that may play a similar role to that of oleosin in seed tissues (Horn et al., 2013). The inventors therefore considered it possible that oleosin might not be the optimal packaging protein to protect the accumulated oil from TAG lipase or other cytosolic enzyme activities in vegetative tissues of plants. LDAP polypeptides were therefore identified and evaluated for enhancement of TAG accumulation, as follows.

[1211] The fruit of Chinese tallow tree, Sapium sebifera, a member of the family Euphorbiaceae, was of particular interest to the inventors as it contains an oil-rich tissue outside of the seed. A recent study (Divi et al, submitted for publication) indicated that this oleoginous tissue, called a tallow layer, might be derived from the mesocarp of its fruit. Therefore, the inventors queried the transcriptome of S. sebifera for LDAP sequences. A comparative analysis of expressed genes in the fruit coat and seed tissues revealed a group of three previously unidentified LDAP genes which were highly expressed in the tallow layer.

[1212] Nucleotide sequences encoding the three LDAPs were obtained by RT-PCR using RNAs derived from tallow tissue using three pairs of primers. The primer sequences were based on the DNA sequences flanking the entire coding region of each of the three genes. The primer sequences were: for LDAP1, 5′-TTTTAACGATATCCGCTAAAGG-3′ (SEQ ID NO: 236) and 5′-AATGAATGAACAAGAATTAAGTC-3′ (SEQ ID NO: 237) AT-3′; LDAP2, 5′-CTTTTCTCACACCGTATCTCCG-3′ (SEQ ID NO: 238) and 5′-AGCATGATATA CTTGTCGAGAAAGC-3′ (SEQ ID NO: 239); LDAP3, 5′-GCGACAGTGTAGCGTTTT-3′ (SEQ ID NO: 240) and 5′-ATACATAAAATGAAAACTATTGTGC-3′ (SEQ ID NO: 241).

[1213] Analysis of the S. sebifera transcriptome revealed multiple orthologs for each of the LDAP genes, including eight LDAP1, six LDAP2, and six LDAP3 genes, with less than 10% sequence divergence within each gene family. The putative peptide sequences were aligned and a phylogenetic tree was constructed using Genious software (FIG. 16), together with LDAPs homologs from other plant species, including two from avocado (Pam), one from oil palm, one from Parthenium argentatum (Par), two from Arabidopsis(Ath), five from Taraxacum brevicorniculatum (Tbr), three from Hevea brasiliensis (Hbr), as presented in FIG. 16. The phylogenetic tree was revealed that the SsLDAP3 shared greater amino acid sequence identity to the LDAP1 and LDAP2 polypeptides from avocado and the LDAP from oil palm, while the SsLDAP1 and SsLDAP2 polypeptides were more divergent.

### Genetic Constructs for Over-Expression of LDAP

[1214] In order to test the function of the LDAPs from S. sebifera, expression vectors were made to express each of these polypeptides under the control of the 35S promoter in leaf cells. The full length SsLDAP cDNA sequences were inserted into the pDONR207 destination vector by recombination reactions, replacing the CcdB and Cm(R) regions of the destination vector with the SsLDAP cDNA fragments. Following confirmation by restriction digestion analysis and DNA sequencing, the constructs were introduced into Agrobacterium tumefaciens strain AGL1 and used for both transient expression in N. benthamiana leaf cells and stable transformation of N. tabacum.

[1215] The expression of each of the three SsLDAP genes under the transcriptional control of the 35S promoter in N. benthamiana leaves in combination with the expression of 35S::AtDGAT1 and 35S::AtWRI1 yielded substantially higher levels of TAG accumulation relative to the cells infiltrated with the 35S::AtDGAT1 and 35S::AtWRI1 genes without the LDAP construct. The TAG level was increased about 2-fold above the TAG level in the control cells. A significant increase in the level of α-linolenic acid (ALA) and a reduced level of saturated fatty acids was observed in the cells receiving the combination of genes, relative to the control cells.

Co-Localisation of YFP-Fused LDAP Polypeptides with Lipid Droplets in Leaf Cells

[1216] In order to characterise SsLDAPs in vivo and observe their dynamic behaviour, expression constructs were made for expression of fusion polypeptides consisting of the LDAP polypeptides fused to yellow fluorescent protein (YFP). For each fusion polypeptide, the YFP was fused in-frame to the C-terminus of the SsLDAP. The full open reading frame of each of the three LDAP genes without a stop codon, at its 3′ end, was fused to the YFP sequence and the chimeric genes inserted into pDONR207. Following confirmation of the resultant constructs by restriction digestion and DNA sequencing, the constructs were introduced into A. tumefaciens strain AGL1 and used for both transient expression in N. benthamiana leaf cells and stable transformation of N. tabacum. Three days following infiltration of the leaf cells with the LDAP-YFP constructs, leaf discs from the infiltrated zones were stained with Nile Red, which positively stained lipid droplets, and observed under a confocal microscope to detect both the red stain (lipid droplets) and fluorescence from the YFP polypeptide. Co-localisation of LDAP-YFP with the lipid droplets was observed, indicating that the LDAP associated with the lipid droplets in the leaf cells.

### Example 12. Silencing of TGD Genes in Plants

[1217] Li-Beisson et al. (2013) estimated that in Arabidopsis leaves (a 16:3 plant), approximately 40% of the fatty acids synthesized in chloroplasts enter the prokaryotic pathway, whereas 60% were exported to enter the eukaryotic pathway. After they were desaturated in the ER, about half of these exported fatty acids are returned to the plastid to support galactolipid synthesis for thylakoid membranes. The transport (import) of the fatty acids as DAG or phospholipids into the plastid involves TGD1, a permease-like protein of the inner chloroplast envelope. The Arabidopsis ABC lipid transporter comprising TGD1, 2, and 3 proteins was identified by Benning et al. (2008 and 2009) and more recently by Roston et al. (2012). This protein complex is localized in the inner chloroplast envelope membrane and is proposed to mediate the transfer of phosphatidate across this membrane. TGD2 polypeptide is a phosphatidic-binding protein, and TGD3 an ATPase. A novel Arabidopsis protein, TGD4, was identified by a genetic approach (Xu et al., 2008) and inactivation of the TGD4 gene also blocked lipid transfer from the ER to plastids. Recent biochemical data indicate that TGD4 is phosphatidate binding protein residing in the outer chloroplast envelope membrane (Wang and Benning, 2012).

[1218] Xu et al. (2005) described leaky tgd1 alleles in A. thaliana resulting in reduced plant growth and high occurrence of embryo abortion. Leaf tissue of A. thaliana tgd1 mutants contained increased TAG levels, likely as cytosol oil droplets. In addition, elevated TAG levels were also found in roots of tgd1 mutants. No difference in seed oil content was detected. Similar TAG accumulation in leaf tissue has been reported for A. thaliana tgd2 (Awai et al., 2006), tgd3 (Lu et al., 2007) and tgd4 mutants (Xu et al., 2008). All tgd mutant alleles were either sufficiently leaky or severely impairing in plant development.

### TGD1 Silencing

[1219] A silencing construct directed against the TGD1 plastidial importer was generated based on a full length mRNA transcript identified in the N. benthamiana transcriptome. A 685 bp fragment was amplified from N. benthamiana leaf cDNA while incorporating a Paul site at the 5′ end. The TGD1 fragment was first cloned into pENTR/D-TOPO (Invitrogen) and subsequently inserted into the pHELLSGATE12 destination vector via LR cloning (Gateway). The resulting expression vector was designated pOIL025 and is transiently expressed in N. benthamiana to assess the effect of TGD1 gene silencing on leaf TAG levels. The TGD1 hairpin construct is placed under the control of the A. niger inducible alcA promotor by subcloning as a PmlI-EcoRV fragment into the NheI (klenow)-SfoI sites of pOIL020 (below). The resulting vector, designated pOIL026, is super-transformed into a homozygous N. tabacum pJP3502 line to further increase leaf oil levels.

[1220] Further constructs are made for expressing hairpin RNA for reducing expression of the TGD-2, -3, -4 and -5 genes. Transformed plants are produced using these constructs and oil content determined in the transformants. The transformed plants are crossed with the transformants generated with pJP3502 or other combinations of genes as described above.

### Example 13. Expression of Gene Combinations in Potato Tubers

[1221] Construction of pJP3506

[1222] A genetic construct containing three genes for expression in potato tubers was made and used for potato transformation. This construct was designated as pJP3506 and was based on an existing vector pJP3502 (WO2013/096993) with replacement of promoters to provide for tuber-specific expression. pJP3506 contained (i) an NPTII kanamycin resistance gene driven by 35S promoter with duplicated enhancer region (e35S) as the selectable marker gene and three gene expression cassettes, which were (ii) 35S::AtDGAT1 encoding the Arabidopsis thaliana DGAT1, (iii) B33::AtWRI1 encoding the Arabidopsis thaliana WRI1, and (iv) B33::sesame oleosin, encoding the oleosin from Sesame indicum. The nucleotide sequences encoding these polypeptides were as in pJP3502. The patatin B33 promoter (B33) was a tuber specific promoter derived from Solanum tuberosum, which was provided by Dr Alisdair Fernie, Max Planck Institute of Molecular Plant Physiology, Potsdam, Germany. A circular plasmid map of pJP3506 is presented in FIG. 17.

[1223] The S. tuberosum Patatin B33 promoter sequence used in the pJP3506 construct was a truncated version having 183 nucleotides deleted from the 5′ end and 261 nucleotides deleted from the 3′ end relative to GenBank Accession No. X14483. The nucleotide sequence of the patatin B33 promoter as used in pJP3506 is given as SEQ ID NO: 202.

### Transformation of Potato

[1224] Potato seedlings (Solanum tuberosum) of cultivar Atlantic which had been grown asceptically in tissue culture were purchased from Toolangi Elite, Victorian Certified Seed Potato Authority (ViCSPA), Victoria, Australia. Stem internodes were excised into pieces of approximately 1 cm in length under a suspension of Agrobacterium tumefaciens strain LBA4404 containing pJP3506. The Agrobacterium cells had been grown to an OD of 0.2 and diluted with an equal volume MS medium. Excess Agrobacterium suspension was removed by brief blotting the stem pieces on sterile filter paper, which were then plated onto MS medium and maintained at 24° C. for two days (co-cultivation). The internodes were then transferred onto fresh MS medium supplemented with 200 μg/L NAA, 2 mg/L BAP and 250 mg/L Cefetaxime. Selection of transgenic calli was initiated 10 days later when the internodes were transferred onto fresh MS medium supplemented with 2 mg/L BAP, 5 mg/L GA3, 50 mg/L kanamycin and 250 mg/L Cefetaxime. Shoots regenerated from calli were excised and placed onto plain MS medium for root induction prior to transplanting into a 15 cm diameter pot containing potting mix and grown in the greenhouse until plant maturity including tuber growth.

[1225] DNA extraction and molecular identification of the transgenic plants by PCR Disks of about 1 cm in diameter were obtained from potato leaves from the plants in the greenhouse. These were placed in a deep-well microtiter plate and freeze dried for 48 hr. The freeze dried leaf samples were then ground into powder by adding a steel ball bearing to each well and shaking the plate in a Reicht tissue lyser (Qiagen) at a maximum frequency of 28/sec for 2 min each side of the microtiter plate. 375 μL of extraction buffer containing 0.1 M Tris-HCl pH8.0, 0.05 M EDTA and 1.25% SDS was added to each well containing the powdered leaf tissue. Following 1 hr incubation at 65° C., 187 μL of 6M ammonium acetate was added to each well and the mixtures stored at 4° C. for 30 min prior to centrifugation of the plates for 30 min at 3000 rpm. 340 μL supernatant from each well was transferred into a new deep well microtiter plate containing 220 μL isopropanol and maintained for 5 min at room temperature prior to centrifugation at 3000 rpm for 30 min. The precipitated DNA pellets were washed with 70% ethanol, air dried and resuspended in 225 μL H₂O per sample.

[1226] Two μL from each leaf sample DNA preparation was added to a 20 μL PCR reaction mix using the HotStar PCR system (Qiagen). A pair of oligonucleotide primers based on 5′ and 3′ sequences from the Arabidopsis thaliana WRI1 gene, codon-optimized for tobacco, was used in the PCR reactions. Their sequences were: Nt-Wri-P3: 5′-CACTCGTGCTTTCCATCATC-3′ (SEQ ID NO: 203) and Nt-Wri-P1: 5′-GAAGGCTGAGCAACAAGAGG-3′(SEQ ID NO: 204). A pair of oligonucleotide primers based on the Arabidopsis thaliana DGAT1 gene, codon-optimized for tobacco, was also used in a separate PCR reaction on each DNA sample. Their sequences were: Nt-DGAT-P2: 5′-GGCGATTTTGGATTCTGC-3′ (SEQ ID NO: 205) and Nt-DGAT-P3: 5′-CCCAACCCTTCCGTATACAT-3′ (SEQ ID NO: 206). Amplification was carried out with an initial cycle at 95° C. for 15 min, followed by 40 cycles of 95° C. for 30 sec, 57° C. for 30 sec and 72° C. for 60 sec. The PCR products were electrophoresed on a 1% agarose gel to detect specific amplification products.

### Lipid Analysis of Potato Tubers

[1227] Thin slices of tubers harvested from regenerated potato plants, for confirmed transgenic plants and non-transformed controls, were freeze-dried for 72 hr and analysed for lipid content and composition. Total lipids were extracted from the dried tuber tissues using chloroform:methanol:0.1 M KCl (2:1:1 v/v/v) as follows. The freeze-dried tuber tissues were first homogenized in chloroform:methanol (2:1, v/v) in an eppendorf tube containing a metallic ball using a Reicht tissue lyser (Qiagen) for 3 min at a frequency of 29 per sec. After mixing each homogenate with a Vibramax 10 (Heidolph) at 2,000 rpm for 15 min, 1/3 volume of 0.1 M KCl solution was added to each sample and mixed further. Following centrifugation at 10,000 g for 5 min, the lower phase containing lipids from each sample was collected and evaporated completely using N₂ flow. Each lipid preparation was dissolved in 3 μL of CHCl₃ per milligram of tuber dry weight. Aliquots of the lipid preparations were loaded on a thin layer chromatography (TLC) plate (20 cm×20 cm, Silica gel 60, Merck) and developed in hexane:diethyl ether:acetic acid (70:30:1, v/v/v). The TLC plate was sprayed with Primuline and visualized under UV to show lipid spots. TAG and PL were recovered by scraping the silica of the appropriate bands and converted to fatty acid methyl esters (FAME) by incubating the material in 1 N methanolic-HCl (Supelco, Bellefonte, Pa.) at 80° C. for 2 hr together with known amount of Triheptadecanoin (Nu-Chek PREP, Inc. USA) as internal standard for lipid quantification. FAME were analysed by GC-FID (7890A GC, Agilent Technologies, Palo Alto, Calif.) equipped with a 30 m BPX70 column (0.25 mm inner diameter, 0.25 mm film thickness, SGE, Austin, USA) as described previously (Petrie et al., 2012). Peaks were integrated with Agilent Technologies ChemStation software (Rev B.04.03).

[1228] Among the approximately 100 individual transgenic lines regenerated, analysis of lipids derived from young potato tubers of about 2 cm in diameter revealed increased levels in total lipids, TAG and phospholipids fractions in tubers from many of the transgenic plants, with a range observed between no increase to substantial increases. The first analysis of the potato tuber lipids indicated that a typical wild-type potato tuber at its early stage of development (about 2 cm in diameter) contained about the 0.03% TAG on dry weight basis.

[1229] The content of total lipids was increased to 0.5-4.7% by weight (dry weight) in tubers of 21 individual transgenic plants, representing 16 independently transformed lines (Table 29). Tubers of line #69 showed the highest TAG accumulation at an average 3.3% on dry weight basis. This was approximately a 100-fold increase relative to the wild-type tubers at the same developmental stage. Tubers of the same transgenic line also accumulated the highest observed levels of phospholipids at 1.0% by weight in the young tubers on a dry weight basis (Table 30). The enhanced lipid accumulation was also accompanied by an altered fatty acid composition in transgenic tubers. The transgenic tubers consistently accumulated higher percentages of saturated and monounsaturated fatty acids (MUFA) and lower level of polyunsaturated fatty acids (PUFA) in both the total fatty acid content and in the TAG fraction of the total fatty acid content (Table 29), particularly a reduced level of 18:3 (ALA) which was reduced from about 17% in the wild-type to less than 10% in the transgenic tubers. The level of oleic acid (18:1) in the total fatty acid content increased from about 1% in the wild-type to more than 5% in many of the lines and more than 15% in some of the tubers. Although palmitic acid levels were increased, the stearic acid (18:0) levels decreased in the best transgenic lines (Tables 28 and 29).

[1230] The transgenic potato plants were maintained in the glasshouse to allow for continued growth of the tubers. Larger tubers of line #69 contained greater levels of TFA and TAG than the tubers of about 2 cm in diameter.

[1231] Further increased levels of TFA and TAG are obtained in potato tubers by addition of a chimeric gene that encodes a silencing RNA for down-regulating the expression of the endogenous SDP1 gene, in combination with the WRI1 and DGAT genes.

### Further Gene Combinations for Transformation of Potato

[1232] Total RNA from fresh developing potato (Solanum tuberosum L. cv. Atlantic) tubers was extracted by the TRIzol method (Invitrogen). Selected regions of the cDNAs encoding potato AGPase small subunit and SDP1 were obtained through RT-PCR using the following primers: st-AGPs1: 5′-ACAGACATGTCTAGACCCAGATG-3′ (SEQ ID NO: 242), st-AGPa1: 5′-CACTCTCATCCCAAGTGAAGTTGC-3′ (SEQ ID NO: 243); st-SDP1-s1: 5′-CTGAGATGGAAGTGAAGCACAGATG-3′ (SEQ ID NO: 244), and st-SDP1-a1: 5′-CCATTGTTAGTCCTTTCAGTC-3′ (SEQ ID NO: 245). The PCR products were then purified and ligated to pGEMT Easy.

TABLE 28
Total lipid yield (% weight of potato tuber dry weight) and its fatty acid composition in representative young potato tubers transformed
with the T-DNA of pJP3506, prior to flowering of the plants. Tubers of line 65 were equivalent to the wild-type (non-transgenic) tubers.

| Sample | C14:0 | C16:0 | C16:1 | C16:3 | C18:0 | C18:1 | C18:1d11 | C18:2 | C18:3 | C20:0 | C20:1 | C22:0 | C24:0 | % TFA |
|---|---|---|---|---|---|---|---|---|---|---|---|---|---|---|
| 4-2 | 0.2 | 16.1 | 0.2 | 0.0 | 5.8 | 0.5 | 11.7 | 55.5 | 5.5 | 2.1 | 0.2 | 0.6 | 1.5 | 1.4 |
| 19 | 0.2 | 18.1 | 0.2 | 0.0 | 5.8 | 0.4 | 12.9 | 52.2 | 5.9 | 2.0 | 0.2 | 0.7 | 1.5 | 1.5 |
| 27-2 | 0.2 | 18.9 | 0.3 | 0.0 | 6.5 | 0.5 | 5.5 | 55.0 | 8.0 | 2.0 | 0.2 | 0.8 | 2.1 | 0.7 |
| 27-4 | 0.2 | 19.0 | 0.3 | 0.0 | 6.5 | 5.4 | 0.5 | 57.0 | 7.9 | 1.6 | 0.0 | 0.5 | 1.1 | 0.6 |
| 27-5 | 0.2 | 17.8 | 0.6 | 0.0 | 6.4 | 2.2 | 0.4 | 57.6 | 11.7 | 1.5 | 0.0 | 0.4 | 1.2 | 0.7 |
| 27-6 | 0.2 | 18.7 | 0.4 | 0.0 | 6.9 | 6.3 | 0.5 | 55.9 | 8.2 | 1.6 | 0.0 | 0.4 | 0.9 | 0.8 |
| 55 | 0.2 | 17.8 | 0.6 | 0.0 | 6.4 | 7.9 | 0.5 | 55.7 | 8.6 | 1.4 | 0.0 | 0.3 | 0.7 | 1.0 |
| 65 | 0.2 | 19.4 | 0.4 | 0.0 | 5.7 | 1.2 | 0.5 | 53.6 | 17.2 | 0.9 | 0.0 | 0.0 | 1.0 | 0.5 |
| 69 | 0.3 | 19.8 | 0.1 | 0.0 | 3.2 | 16.5 | 0.9 | 53.2 | 3.7 | 1.1 | 0.3 | 0.4 | 0.6 | 4.7 |
| 78 | 0.2 | 19.5 | 0.5 | 0.0 | 5.3 | 4.9 | 0.5 | 54.7 | 11.7 | 1.2 | 0.0 | 0.4 | 1.0 | 0.9 |
| 83 | 0.2 | 16.7 | 0.4 | 0.0 | 6.5 | 7.3 | 0.5 | 56.2 | 8.5 | 1.7 | 0.6 | 0.5 | 0.9 | 1.3 |
| 95-1 | 0.3 | 21.0 | 0.2 | 0.1 | 3.1 | 15.2 | 0.8 | 52.8 | 4.2 | 1.1 | 0.2 | 0.3 | 0.7 | 3.0 |
| 95-2 | 0.4 | 21.3 | 0.3 | 0.1 | 4.1 | 7.1 | 1.0 | 56.1 | 7.3 | 1.2 | 0.2 | 0.3 | 0.7 | 2.7 |
| 95-3 | 0.4 | 21.4 | 0.3 | 0.0 | 4.3 | 8.5 | 0.9 | 54.5 | 7.4 | 1.3 | 0.0 | 0.3 | 0.7 | 1.5 |
| 100 | 0.4 | 19.0 | 0.5 | 0.0 | 5.4 | 7.6 | 0.8 | 55.5 | 7.3 | 1.4 | 0.5 | 0.5 | 0.9 | 1.0 |
| 104 | 0.2 | 18.0 | 0.2 | 0.0 | 6.1 | 0.5 | 6.8 | 56.1 | 7.6 | 2.3 | 0.1 | 0.6 | 1.5 | 0.9 |
| 106 | 0.2 | 19.7 | 0.2 | 0.1 | 4.6 | 0.9 | 10.7 | 54.1 | 5.7 | 1.7 | 0.1 | 0.6 | 1.3 | 1.3 |

TABLE 29
TAG yield (% weight of potato tuber dry weight) and its fatty acid composition in representative
young potato tubers, transformed with the T-DNA of pJP3506, prior to flowering of the plants.

| Sample | C14:0 | C16:0 | C16:1 | C16:3 | C18:0 | C18:1 | C8:1d11 | C18:2 | C18:3 | C20:0 | C20:1 | C22:0 | C24:0 | % TAG |
|---|---|---|---|---|---|---|---|---|---|---|---|---|---|---|
| WT | 0.4 | 13.4 | 0.0 | 0.0 | 4.6 | 5.5 | 0.5 | 59.9 | 15.7 | 0.0 | 0.0 | 0.0 | 0.0 | 0.03 |
| 4-2 | 0.3 | 15.4 | 0.2 | 0.0 | 7.0 | 0.6 | 16.4 | 52.5 | 3.1 | 2.6 | 0.2 | 0.6 | 1.1 | 0.5 |
| 19 | 0.2 | 16.3 | 0.1 | 0.0 | 7.2 | 18.0 | 0.5 | 50.9 | 3.6 | 1.9 | 0.2 | 0.4 | 0.6 | 0.8 |
| 27-2 | 0.0 | 19.0 | 0.0 | 0.0 | 11.2 | 9.8 | 0.0 | 52.8 | 4.4 | 2.8 | 0.0 | 0.0 | 0.0 | 0.2 |
| 27-4 | 0.4 | 17.4 | 0.0 | 0.0 | 10.2 | 9.4 | 0.0 | 55.4 | 4.7 | 2.6 | 0.0 | 0.0 | 0.0 | 0.2 |
| 27-5 | 0.0 | 17.9 | 0.0 | 0.0 | 12.5 | 4.4 | 0.0 | 54.9 | 7.1 | 3.2 | 0.0 | 0.0 | 0.0 | 0.1 |
| 27-6 | 0.0 | 17.1 | 0.0 | 0.0 | 9.9 | 10.6 | 0.0 | 55.0 | 4.9 | 2.5 | 0.0 | 0.0 | 0.0 | 0.2 |
| 55 | 0.3 | 17.6 | 0.5 | 0.0 | 8.5 | 12.5 | 0.6 | 52.5 | 5.2 | 1.9 | 0.0 | 0.0 | 0.6 | 0.5 |
| 65 | 0.0 | 18.1 | 0.0 | 0.0 | 12.0 | 0.0 | 0.0 | 55.6 | 14.4 | 0.0 | 0.0 | 0.0 | 0.0 | 0.0 |
| 69 | 0.3 | 20.1 | 0.6 | 0.0 | 3.8 | 20.3 | 1.0 | 49.4 | 2.2 | 1.3 | 0.2 | 0.3 | 0.5 | 3.3 |
| 78 | 0.0 | 19.1 | 0.0 | 0.0 | 8.2 | 9.4 | 0.0 | 52.5 | 8.4 | 2.4 | 0.0 | 0.0 | 0.0 | 0.2 |
| 83 | 0.3 | 16.4 | 0.2 | 0.0 | 8.7 | 11.1 | 0.6 | 53.4 | 5.4 | 2.6 | 0.0 | 0.5 | 0.7 | 0.5 |
| 95-1 | 0.3 | 21.7 | 0.4 | 0.1 | 3.6 | 18.5 | 1.0 | 50.1 | 2.8 | 0.9 | 0.2 | 0.2 | 0.3 | 2.2 |
| 95-2 | 0.6 | 23.4 | 0.4 | 0.0 | 5.1 | 10.1 | 1.2 | 51.9 | 5.3 | 1.4 | 0.0 | 0.0 | 0.5 | 0.9 |
| 95-3 | 0.3 | 17.2 | 0.3 | 0.0 | 7.7 | 0.6 | 11.6 | 49.7 | 8.9 | 2.5 | 0.0 | 0.0 | 1.1 | 0.1 |
| 100 | 0.0 | 18.8 | 0.5 | 0.0 | 8.0 | 12.0 | 0.8 | 54.0 | 3.9 | 2.0 | 0.0 | 0.0 | 0.0 | 0.4 |
| 104 | 0.3 | 17.7 | 0.0 | 0.0 | 8.4 | 0.6 | 11.0 | 52.1 | 4.7 | 3.2 | 0.0 | 0.7 | 1.3 | 0.3 |
| 106 | 0.4 | 20.1 | 0.3 | 0.0 | 5.4 | 15.5 | 1.1 | 51.8 | 3.6 | 1.4 | 0.0 | 0.0 | 0.4 | 0.7 |

TABLE 30
Phospholipids yield (% weight of potato tuber dry weight) and its fatty acid composition in representative
young potato tubers, transformed with the T-DNA of pJP3506, prior to flowering.

| Sample | C14:0 | C16:0 | C16:1 | C16:3 | C18:0 | C18:1 | C18:1d11 | C18:2 | C18:3 | C20:0 | C20:1 | C22:0 | C24:0 | % PL |
|---|---|---|---|---|---|---|---|---|---|---|---|---|---|---|
| 4-2 | 0.2 | 21.2 | 0.2 | 0.0 | 4.6 | 0.4 | 3.8 | 57.8 | 9.3 | 0.9 | 0.0 | 0.0 | 1.7 | 0.3 |
| 19 | 0.1 | 22.7 | 0.2 | 0.0 | 4.4 | 5.1 | 0.3 | 54.9 | 8.9 | 0.7 | 1.0 | 0.5 | 1.2 | 0.4 |
| 27-2 | 0.2 | 21.0 | 0.3 | 0.0 | 5.2 | 2.8 | 0.4 | 56.9 | 9.3 | 0.9 | 1.3 | 0.4 | 1.4 | 0.4 |
| 27-4 | 0.0 | 22.9 | 0.0 | 0.0 | 6.0 | 2.3 | 0.0 | 57.2 | 8.8 | 1.1 | 0.0 | 0.0 | 1.6 | 0.3 |
| 27-5 | 0.0 | 19.6 | 0.5 | 0.0 | 5.0 | 1.2 | 0.0 | 58.7 | 12.6 | 1.0 | 0.0 | 0.0 | 1.4 | 0.4 |
| 27-6 | 0.0 | 22.9 | 0.0 | 0.0 | 6.3 | 2.6 | 0.0 | 56.3 | 9.3 | 1.2 | 0.0 | 0.0 | 1.5 | 0.3 |
| 55 | 0.1 | 21.2 | 0.4 | 0.0 | 5.1 | 2.1 | 0.0 | 57.8 | 11.4 | 0.7 | 0.0 | 0.0 | 1.0 | 0.4 |
| 65 | 0.0 | 21.4 | 0.4 | 0.0 | 5.9 | 1.1 | 0.0 | 53.2 | 15.7 | 1.0 | 0.0 | 0.0 | 1.3 | 0.3 |
| 69 | 0.2 | 21.5 | 0.2 | 0.0 | 2.3 | 3.7 | 0.6 | 61.9 | 7.9 | 0.6 | 0.0 | 0.4 | 0.8 | 1.0 |
| 78 | 0.0 | 22.1 | 0.4 | 0.0 | 4.4 | 2.7 | 0.4 | 55.6 | 12.2 | 0.8 | 0.0 | 0.0 | 1.3 | 0.4 |
| 83 | 0.2 | 21.1 | 0.3 | 0.0 | 5.0 | 2.9 | 0.4 | 57.1 | 10.7 | 0.8 | 0.0 | 0.4 | 1.1 | 0.5 |
| 95-1 | 0.2 | 24.8 | 0.5 | 0.0 | 2.6 | 3.5 | 0.6 | 59.1 | 7.6 | 0.6 | 0.0 | 0.0 | 0.6 | 0.6 |
| 95-2 | 0.3 | 22.1 | 0.0 | 0.0 | 2.7 | 2.1 | 0.6 | 61.0 | 9.6 | 0.7 | 0.0 | 0.0 | 0.9 | 0.6 |
| 95-3 | 0.2 | 23.2 | 0.5 | 0.0 | 3.1 | 3.6 | 0.7 | 57.7 | 9.3 | 0.7 | 0.0 | 0.0 | 0.9 | 0.5 |
| 100 | 0.0 | 23.3 | 0.5 | 0.0 | 4.6 | 3.0 | 0.4 | 57.2 | 9.0 | 0.8 | 0.0 | 0.0 | 1.1 | 0.4 |
| 104 | 0.0 | 21.3 | 0.0 | 0.0 | 4.8 | 2.7 | 0.0 | 58.3 | 10.1 | 1.0 | 0.0 | 0.0 | 1.7 | 0.4 |
| 106 | 0.2 | 23.2 | 0.2 | 0.0 | 3.8 | 3.0 | 0.6 | 57.1 | 8.6 | 0.7 | 1.0 | 0.4 | 1.1 | 0.4 |

[1233] Following verification by DNA sequencing, the cloned PCR products were either directly used as the target gene sequence to make a hairpin RNAi construct or fused by overlapping PCR. Three PCR fragments (SDP1, AGPase, SDP+AGP) were subsequently cloned into the pKannibal vector that contained specific restriction sites to clone the desired fragment in sense and antisense orientation. The restriction sites selected were BamHI and HindIII for cloning the fragment in the sense orientation and KpnI and XhoI for inserting the fragment in the antisense orientation. Primers sets used for amplification of the three target gene fragments were altered by addition of restriction sites which direct the fragment into cloning sites of pKannibal. The expression cassettes containing the target DNA fragment between the 35S promoter and OCS terminator in pKannibal were released with NotI and cloned into a binary vector pWBVec2 with hygromycin as the plant selectable marker. Such binary vectors were introduced into A. tumefaciens AGL1 strain and used for potato transformation as described above.

### Example 14. Modifying Traits in Monocotyledonous Plants

### Expression in Endosperm

[1234] The oil content in the endosperm of the monocotyledonous plant species Triticum aestivum (wheat) and therefore in the grain of the plants was increased by expressing a combination of genes encoding WRI1, DGAT and Oleosin in the endosperm during grain development using endosperm-specific promoters. The construct (designated pOIL-Endo2) contained the chimeric genes: (a) the promoter of the Glu1 gene of Brachypodium distachyon::protein coding region of the Zea mays gene encoding the ZmWRI1 polypeptide (SEQ ID NO:35)::terminator/polyadenylation region from the Glycine max lectin gene, (b) the promoter of the Bx17 glutenin gene of Triticum aestivum::protein coding region of the A. thaliana gene encoding the AtDGAT1 polypeptide (SEQ ID NO:1)::terminator/polyadenylation region from the Agrobacterium tumefaciens Nos gene, (c) the promoter of the GluB4 gene of Oryza sativa::protein coding region of the Sesame indicum gene encoding the Oleosin polypeptide::terminator/polyadenylation region from the Glycine max lectin gene and (d) a 35S promoter::hygromycin resistance coding region as a selectable marker gene. The construct was used to transform immature embryos of T. aestivum (cv. Fielder) by Agrobacterium-mediated transformation. The inoculated immature embryos were exposed to hygromycin to select transformed shoots and then transferred to rooting medium to form roots, before transfer to soil.

[1235] Thirty transformed plants were obtained which set T1 seed and contained the T-DNA from pOIL-Endo2. Mature seeds were harvested from all 30 plants, and 6 seed of each family cut in half. The halves containing the embryo were stored for later germination; the other half containing mainly endosperm was extracted and tested for oil content. The T-DNA inserted into the wheat genome was still segregating in the T1 seeds from these plants, so the T1 seeds were a mixture of homozygous transformed, heterozygous transformed and nulls for the T-DNA. Increased oil content was observed in the endosperm of some of the grains, with some grains showing greater than a 5-fold increase in TAG levels. The endosperm halves of six wild-type grains (cv. Fielder) had a TAG content of about 0.47% by Weight (range 0.37% to 0.60%), compared to a TAG content of 2.5% in some grains. Some families had all six grains with TAG in excess of 1.7%; others were evidently segregating with both wild type and elevated content of TAG. In endosperms with elevated TAG content the fatty acid composition was also altered, showing increases in the percentages of oleic acid and palmitic acid, and a decrease in the percentage of linoleic acid (Table 31). The T1 grain germinated without difficulty at the same rate as the corresponding wild-type grain and plants representing both high oil and low oil individuals from 14 TO families were grown to maturity. These plants were fully male and female fertile.

TABLE 31
Fatty acid composition (% of total fatty acids) of TAG content and the total TAG
content (% oil by weight of half endosperms) in transgenic wheat endosperm

| Sample | C14:0 | C16:0 | C16:1 | C16:3 | C18:0 | C18:1 | C18:1d11 |
|---|---|---|---|---|---|---|---|
| Control 1 | 0.3 | 16.9 | 0.1 | 0.0 | 1.6 | 15.6 | 0.6 |
| Control 2 | 0.3 | 16.0 | 0.1 | 0.1 | 1.6 | 15.1 | 0.6 |
| F5.3 | 0.1 | 20.1 | 0.1 | 0.1 | 2.6 | 23.5 | 0.6 |
| F16.3 | 0.1 | 19.1 | 0.1 | 0.1 | 2.8 | 24.2 | 0.6 |

| | | | | | | | % oil |
|---|---|---|---|---|---|---|---|
| Sample | C18:2 | C18:3n3 | C20:0 | C20:1 | C22:0 | C24:0 | by wt. |
| Control 1 | 60.4 | 4.0 | 0.1 | 0.4 | 0.0 | 0.0 | 0.5 |
| Control 2 | 61.3 | 4.3 | 0.1 | 0.3 | 0.0 | 0.0 | 0.49 |
| F5.3 | 48.5 | 2.4 | 0.8 | 0.7 | 0.3 | 0.4 | 2.5 |
| F16.3 | 48.1 | 2.9 | 0.7 | 0.5 | 0.3 | 0.4 | 1.8 |

[1236] 220 T2 seed from 22 selected T1 plants were analysed, plus 40 plants from 3 different parental Fielder plants. In most cases term T2 seed from each T1 plant were tested. Some of the selected T1 plants were nulls with wild type endosperm TAG levels. Some of the results for endosperm half seed analyses are represented in FIG. 18. The high endosperm oil T1 plants produced T2 grain many of which had increased endosperm oil, whereas the control Fielder and null segregant T1 plants produced grain with similar levels of endosperm oil (total fatty acid, TFA).

[1237] The grain is useful for preparing food products for human consumption or as animal feed, providing grain with an increased energy content per unit weight (energy density) and resulting in increased growth rates in the animals such as, for example, poultry, pigs, cattle, sheep and horses.

[1238] The construct pOIL-Endo2 is also used to transform corn (Zea mays) and rice (Oryza sativa) to obtain transgenic plants which have increased TAG content in endosperm and therefore in grain.

### Expression in Leaves and Stems

[1239] A series of binary expression vectors was designed for Agrobacterium-mediated transformation of sorghum (S. bicolor) and wheat (Triticum aestivum) to increase the oil content in vegetative tissues. The starting vectors for the constructions were pOIL093-095, pOIL134 and pOIL100-104 (see Example 5). Firstly, a DNA fragment encoding the Z. mays WRI1 polypeptide was amplified by PCR using pOIL104 as a template and primers containing KpnI restriction sites. This fragment was subcloned downstream of the constitutive Oryza sativa Actin1 promoter of pOIL095, using the KpnI site. The resulting vector was designated pOIL154. The DNA fragment encoding the Umbelopsis ramanniana DGAT2a under the control of the Z. mays ubiquitin promoter (pZmUbi) was isolated from pOIL134 as a NotI fragment and inserted into the NotI site of pOIL154, resulting in pOIL155. An expression cassette consisting of the PAT coding region under the control of the pZmUbi promoter and flanked at the 3′ end by the A. tumefaciens NOS terminator/polyadenylation region was constructed by amplifying the PAT coding region using pJP3416 as a template. Primers were designed to incorporate BamHI and SacI restriction sites at the 5′ and 3′ ends, respectively. After BamHI+SacI double digestion, the PAT fragment was cloned into the respective sites of pZLUbi1casNK. The resulting intermediate was designated pOIL141. Next, the PAT selectable marker cassette was introduced into the pOIL155 backbone. To this end, pOIL141 was first cut with NotI, blunted with Klenow fragment of DNA polymerase I and subsequently digested with AscI. This 2622 bp fragment was then subcloned into the ZraI-AscI sites of pOIL155, resulting in pOIL156. Finally, the Actin1 promoter driving WRI1 expression in pOIL156 was exchanged for the Z. mays Rubisco small subunit promoter (pZmSSU) resulting in pOIL157. This vector was obtained by PCR amplification of the Z. mays SSU promoter using pOIL104 as a template and flanking primers containing AsiSI and PmlI restriction sites. The resulting amplicon was then cut with SpeI+MluI and subcloned into the respective sites of pOIL156.

[1240] These vectors therefore contained the following expression cassettes:

[1241] pOIL156: promoter O. sativa Actin1::Z. mays WRI1, promoter Z. mays Ubiquitin:: U. rammaniana DGAT2a and promoter Z. mays Ubiquitin::PAT

[1242] pOIL157: promoter Z. mays SSU::Z. mays WRI1, promoter Z. mays Ubiquitin:: U. rammaniana DGAT2a and Z. mays Ubiquitin::PAT.

[1243] A second series of binary expression vectors containing the Z. mays SEE1 senescence promoter (Robson et al., 2004, see Example 5), Z. mays LEC1 transcription factor (Shen et al., 2010) and a S. bicolor SDP1 hpRNAi fragment were constructed as follows. First, a matrix attachment region (MAR) was introduced into pORE04 by AatII+SnaBI digest of pDCOT and subcloning into the AatII+EcoRV sites of pORE04. The resulting intermediate vector was designated pOIL158. Next, the PAT selectable marker gene under the control of the Z. mays Ubiquitin promoter was subcloned into pOIL158. To this end, pOIL141 was first digested with NotI, treated with Klenow fragment of DNA polymerase I and finally digested with AscI. The resulting fragment was inserted into the AscI+ZraI sites of pOIL158, resulting in pOIL159. The original RK2 oriV origin of replication in pOIL159 was exchanged for the RiA4 origin by SwaI+SpeI restriction digestion of pJP3416, followed by subcloning into the SwaI+AvrII sites of pOIL159. The resulting vector was designated pOIL160. A 10.019 kb ‘Monocot senescence part1’ fragment containing the following expression cassettes was synthesized: O. sativa Actin1::A. thaliana DGAT1, codon optimized for Z. mays expression, Z. mays SEE1::Z. mays WRI1, Z. mays SEE1::Z. mays LEC1. This fragment was subcloned as a SpeI-EcoRV fragment into the SpeI-StuI sites of pOIL160, resulting in pOIL161. A second 7.967 kb ‘Monocot senescence part2’ fragment was synthesized and contains the following elements: MAR, Z. mays Ubiquitin::hpRNAi fragment targeted against S. bicolor/T. aestivum SDP1, empty cassette under the control of the O. sativa Actin1 promoter. The sequences of two S. bicolor SDP1 TAG lipases (Accession Nos. XM_002463620; SEQ ID NO:233 and XM_002458486; SEQ ID NO:169) and one T. aestivum SDP1 sequence (Accession No. AK334547) (SEQ ID NO: 234) were obtained by a BLAST search with the A. thaliana SDP1 sequence (Accession No. NM_120486). A synthetic hairpin construct (SEQ ID NO:235) was designed including four fragments (67 bp, 90 bp, 50 bp, 59 bp) of the S. bicolor XM_002458486 sequence that showed highest degree of identity with the T. aestivum SDP1 sequence. In addition, a 278 bp fragment originating from the S. bicolor XM_002463620 SDP1 lipase was included to increase silencing efficiency against both S. bicolor SDP1 sequences. The ‘Monocot senescence part2’ fragment is subcloned as a BsiWI-EcoRV fragment into the BsiWI-FspI sites of pOIL161. The resulting vector is designated pOIL162.

[1244] The genetic constructs pOIL156 pOIL157, pOIL161 and pOIL162 are used to transform S. bicolor and T. aestivum using Agrobacterium-mediated transformation. Transgenic plants are selected for hygromycin resistance and contain elevated levels of TAG and TFA in vegetative tissues compared to untransformed control plants. Such plants are useful for providing feed for animals as hay or silage, as well as producing grain, or may be used to extract oil.

[1245] Further genetic constructs are made for expression of combinations of polypeptides in leaves and stems of monocotyledonous plants, including the C4-photosynthesis plants S. bicolor and Z. mays. Several constructs are made containing genes for expression of WRI1, DGAT and oleosin, with each gene under the control of a constitutive promoter such as a maize Ubiquitin gene promoter or a rice actin gene promoter, and containing an NPTII gene as selectable marker gene. In one particular construct, the WRI1 is sorghum WRI1. In another, the oleosin is SiOleosinL (see Example 17). In other particular constructs, the oleosin gene is replaced with a gene encoding either LDAP2 or LDAP3 from S. sebifera (Example 11). These constructs are used as the “core constructs” for transformation of S. bicolor and Z. mays and are deployed on their own or in combination with genetic constructs for expression of a hairpin RNA targeting one or more SDP1 genes in sorghum or maize (see above), a construct encoding Lec2 under the control of a SEE1 promoter (senescence specific), or both. Another construct is made comprising three genes, namely for expression of a hairpin RNA targeting the endogenous TGD5 gene to reduce its expression, a FatA fatty acyl thioesterase and a PDAT, which is used to increase the level of TAG and/or the TTQ parameter for plants transformed with this construct.

### Example 15. Extraction of Oil

[1246] Extraction of Lipid from Leaves

[1247] Transgenic tobacco leaves which had been transformed with the T-DNA from pJP3502 were harvested from plants grown in a glasshouse during the summer months. The leaves were dried and then ground to 1-3 mm sized pieces prior to extraction. The ground material was subject to soxhlet (refluxing) extraction over 24 hours with selected solvents, as described below. 5 g of dried tobacco leaf material and 250 ml of solvent was used in each extraction experiment.

### Hexane Solvent Extraction

[1248] Hexane is commonly used as a solvent commercially for oil extraction from pressed oil seeds such as canola, extracting neutral (non-polar) lipids, and was therefore tried first. The extracted lipid mass was 1.47 g from 5 g of leaf material, a lipid recovery of 29% by weight. 1H NMR analysis of the hexane extracted lipid in DMSO was preformed. The analysis showed typical signals for long chain triglyceride fatty acids, with no aromatic products being present. The lipid was then subjected to GCMS for identification of major components. Direct GCMS analysis of the hexane extracted lipid proved to be difficult as the boiling point was too high and the material decomposed in the GCMS. In such situations, a common analysis technique is to first make methyl esters of the fatty acids, which was done as follows: 18 mg lipid extract was dissolved in 1 mL toluene, 3 mL of dry 3N methanolic HCL was added and stirred overnight at 60° C. 5 mL of 5% NaCl and 5 mL of hexane were added to the cooled vial and shaken. The organic layer was removed and the extraction was repeated with another 5 mL of hexane. The combined organic fractions were neutralized with 8 mL of 2% KHCO3, separated and dried with Na2SO4. The solvent was evaporated under a stream of N2 and then made up to a concentration of 1 mg/mL in hexane for GCMS analysis. The main fatty acids present were 16:0 (palmitic, 38.9%) and 18:1 (oleic, 31.3%).

| FA | 16:0 | 16:1 | 18:0 | 18:1 | 18:2 | 20:0 | 22:0 |
|---|---|---|---|---|---|---|---|
| % wt | 38.9 | 4.6 | 6.4 | 31.3 | 2.5 | 1.5 | 0.6 |

### Acetone Solvent Extraction

[1249] Acetone was used as an extraction solvent because its solvent properties should extract almost all lipid from the leaves, i.e. both non-polar and polar lipids. The acetone extracted oil looked similar to the hexane extracted lipid. The extracted lipid mass was 1.59 g from 5 g of tobacco leaf, i.e. 31.8% by weight. 1H NMR analysis of the lipid in DMSO was performed. Signals typical of long chain triglyceride fatty acids were observed, with no signal for aromatic products.

### Hot Water Solvent Extraction

[1250] Hot water was attempted as an extraction solvent to see if it was suitable to obtain oil from the tobacco leaves. The water extracted material was gel like in appearance and gelled when cooled. The extracted mass was 1.9 g, or 38% by weight. This material was like a thick gel and was likely to have included polar compounds from the leaves such as sugars and other carbohydrates. The 1H NMR analysis of the material in DMSO was preformed. The analysis showed typical signals for long chain triglyceride fatty acids, with no aromatic products being extracted. The left over solid material was extracted with hexane, yielding 20% of lipid by weight, indicating that the water extraction had not efficiently extracted non-polar lipids.

### Ethanol Solvent Extraction

[1251] Ethanol was used as an extraction solvent to see if it was suitable to obtain oil from the tobacco leaves. The ethanol extracted lipid was similar in appearance to both the water- and hexane-extracted lipid, being yellow-red in colour, had a gel-like appearance and gelled when cooled. The extracted lipid mass was 1.88 g from 5 g tobacco, or 37.6% by weight. The ethanol solvent would also have extracted some of the polar compounds in the tobacco leaves.

### Ether Solvent Extraction

[1252] Diethyl ether was attempted as an extraction solvent since it was thought that it might extract less impurities than other solvents. The extraction yielded 1.4 g, or 28% by weight. The ether extracted lipid was similar to the hexane extracted material in appearance, was yellowish in colour, and it did appeared a little cleaner than the hexane extract. While the diethyl ether extraction appeared to have given the cleanest oil, the NMR analysis showed a mixture of more organic compounds.

### Example 16. Feed Rations for Dairy Cows

[1253] Leaves and stems from sorghum or corn plants comprising increased TAG and TFA contents are harvested and chopped into pieces 1-2 cm in size. The processed plant parts are ensiled for at least two weeks and then mixed with other components to produce a feedstuff for dairy cows. The feed mixture for dairy cows comprises: 7.5-10 kg of sorghum or corn silage comprising increase TAG and TFA, 4-5 kg of alfalfa hay, 1 kg brewers grain (about 67% digestible dry matter), 1-2 kg seed meal (canola or soy) or cottonseed, 0.5 kg molasses and mineral supplements such as calcium, phosphorus, magnesium and sulfur. Lipid is optimally present at 5-7% of the total dry matter. Additional amino acids such as lysine and methionine or non-protein nitrogen supplies such as urea may be added, depending on the total protein content. The feedstuff has increased energy density, increased feed value, increased nutritive value and increased digestibility relative to a corresponding feedstuff made with an equivalent amount of wild-type sorghum or corn silage. The increased lipid in the high-oil sorghum or corn silage results in an additional milk production of up to 3 litres per day and an increase of 0.33% in milk fat for each kilogram of lipid eaten.

[1254] A heifer will eat the equivalent of about 2.3% of her body weight daily and an adult dry cow will eat the equivalent of about 1.5% of her body weight daily. For example, a 300 kg heifer can eat up to 7 kg dry matter and an adult, dry cow weighing 470 kg will eat about the same amount. Lactating cows have greater feed intakes, up to about 4% of body weight per day. Indeed, feed intake on a weight basis tends to increase with feed quality and palatability.

### Example 17. Expression of Oil Body Proteins in Plant Vegetative Tissues

[1255] A protein coding region encoding a Rhodococcus opacus TadA lipid droplet associated protein (MacEachran et al. 2010; Accession number HM625859), codon optimized for expression in dicotyledonous plants such as Nicotiana benthamiana, was synthesised as a NotI-SpeI DNA fragment. The fragment was inserted downstream of the 35S promoter in pJP3343 using the NotI-SpeI sites. The resultant plasmid was designated pOIL380. A protein coding region encoding a Sesame indicum OleosinL lipid droplet associated protein (Tai et al. 2002; Accession number AF091840; SEQ ID NO:305) was synthesised as a NotI-SacI DNA fragment and inserted downstream of the 35S promoter in pJP3343 using the same sites. The resultant plasmid was designated pOIL382. A protein coding region encoding a Sesame indicum OleosinH1 lipid droplet associated protein (Tai et al., 2002; Accession number AF302807) was synthesised as a NotI-SacI DNA fragment and cloned downstream of the 35S promoter in pJP3343 using the same sites. The resultant plasmid was designated pOIL383. A variant of the protein coding region encoding S. indicum OleosinH1 having three amino acid substitutions to remove ubiquitination sites (K130R, K143R, K145R) (Hsiao and Tzen, 2011) was generated by targeted mutagenesis. The coding region was inserted downstream of the 35S promoter in pJP3343 as a NotI-SacI fragment. The resultant plasmid was designated pOIL384. A protein coding region encoding a Vanilla planifolia leaf OleosinU1 lipid droplet associated protein (Huang and Huang, 2016; Accession number SRX648194) was codon optimized for expression in N. benthamiana, synthesised as a SpeI-EcoRI DNA fragment and inserted downstream of the 35S promoter in pJP3343 using the same sites. The resultant plasmid was designated pOIL386. A protein coding region encoding a Persea americana mesocarp OleosinM lipid droplet associated protein (Huang and Huang 2016; Accession number SRX627420) was codon optimized for expression in N. benthamiana, synthesised as a SpeI-EcoRI DNA fragment and inserted downstream of the 35S promoter in pJP3343 using the same restriction sites. The resultant plasmid was designated pOIL387. A protein coding region encoding an Arachis hypogaea Oleosin 3 lipid droplet associated protein (Parthibane et al., 2012a; Accession number AY722696) was codon optimized for expression in N. benthamiana, flanked by NotI sites and inserted into the binary expression vector pJP3502. The resulting plasmid, pOIL041, was digested with NotI and the resultant 520 bp DNA fragment was inserted downstream of the 35S promoter of pJP3343. The resultant plasmid was designated pOIL190. Similarly, the protein coding region for the A. thaliana Caleosin3 lipid droplet associated protein (Shen et al., 2014; Laibach et al., 2015; Accession number AK317039) was codon optimized for expression in N. benthamiana, flanked by NotI sites and inserted into pJP3502. The resulting plasmid, pOIL042, was digested with NotI and the resulting 604 bp DNA fragment was inserted downstream of the 35S promoter of pJP3343. The resultant plasmid was designated pOIL191. A protein coding region encoding an A. thaliana steroleosin lipid droplet associated protein (Accession number AT081653) was codon optimized for expression in N. benthamiana, flanked by NotI sites and inserted into pJP3502. The resultant plasmid, pOIL043, was digested with NotI and the resultant 1069 bp DNA fragment was inserted downstream of the 35S promoter of pJP3343. The resultant plasmid was designated pOIL192. A protein coding region encoding a Nannochloropsis oceanica LSDP oil body protein (Vieler et al., 2012; Accession number JQ268559) was codon optimized for expression in N. benthamiana, flanked by NotI sites and inserted into the pJP3502 binary expression vector. The resultant plasmid, pOIL044, was digested with NotI and the 496 bp DNA fragment was inserted downstream of the 35S promoter of pJP3343. The resultant plasmid was designated pOIL193. A protein coding region encoding a Trichoderma reesei HFBI hydrophobin (Linder et al., 2005; Accession number Z68124) was codon optimized for expression in N. benthamiana, flanked by NotI sites and inserted into pJP3502. The resultant plasmid, pOIL045, was digested with NotI and the 313 bp DNA fragment was inserted downstream of the 35S promoter of pJP3343. The resultant plasmid was designated pOIL194. An ER-targeted variant of the Trichoderma reesei HFBI hydrophobin was created by amending the KDEL ER retention peptide to the C-terminus (Gutierrew et al., 2013). This variant was codon optimized for expression in N. benthamiana and cloned as a NotI fragment into pJP3502, resulting in pOIL046. Subsequently, pOIL046 was digested with NotI and the 325 bp fragment was inserted into pJP3343. The resulting vector was designated pOIL195.

[1256] Each of the genetic constructs encoding the lipid droplet associated polypeptides were introduced into N. benthamiana leaves in combination with genetic constructs encoding WRI1, DGAT1 and p19 as described in Example 1 with some minor modifications. Agrobacterium tumefaciens cultures containing the gene coding for the p19 silencing suppressor protein and the chimeric genes of interest were mixed such that the final OD600 of each culture was equal to 0.125 prior to infiltration. Samples being compared were located on the same leaf. After infiltration, N. benthamiana plants were grown for a further five days before leaf discs were harvested, pooled across three leaves from the same plant, freeze-dried, weighed and stored at −80° C. Total lipids were extracted from freeze-dried tissues using chloroform:methanol:0.1 M KCl (2:1:1 v/v/v) and aliquots loaded on a thin layer chromatography (TLC) plate and developed in hexane:diethyl ether:acetic acid (70:30:1, v/v/v). TAG was recovered, converted to FAME in the presence of a known amount of triheptadecanoin (Nu-Chek PREP, Inc. USA) as internal standard for lipid quantitation, and analysed by GC-FID.

[1257] The assays showed a range of TAG levels compared to the WRI1+DGAT1 control. Some constructs encoding lipid droplet associated polypeptides increased the TAG level relative to the control in some assays whereas others did not. A consistent and statistically significant increase in TAG content was observed when the construct expressing SiOleosinL (pOIL382) was introduced (FIG. 20); this construct was superior to all the others tested in these assays. An increase in the levels of C18:2 and C18:1 and a decrease in C16:0 was also observed in the TAG for this construct, relative to the p19+WRI1+DGAT1 control (FIG. 20). Microscopic analyses to visualise lipid droplets in the leaf cells expressing SiOleosinL showed a decrease in lipid droplet size and an increase in abundance compared to the control.

[1258] Further assays were carried out using radiolabelled [14C]-acetate to measure the rate of TAG synthesis for the different gene combinations including each of the lipid droplet associated polypeptides. The [14C]-acetate was infiltrated into the same leaf tissues at 3 days post-infiltration of the genetic constructs i.e. after the genes had been expressed for three days. Three hours later, leaf discs were harvested and total lipids in the tissues were extracted and fractionated by TLC. The amount of radioactivity in different lipid types was quantitated using a Fujifilm FLA-5000 phosphorimager. These assays demonstrated an increase in TAG synthesis rates in the leaves expressing SiOleosinL (pOIL382) as well as an increase in PC and PA synthesis rates over the three hours in leaves expressing SiOleosinL. In contrast, the genetic constructs encoding SiOleosinH, vanilla leaf and avocado mesocarp oleosins did not show a significant effect on TAG synthesis rate or content.

[1259] It will be appreciated by persons skilled in the art that numerous variations and/or modifications may be made to the invention as shown in the specific embodiments without departing from the spirit or scope of the invention as broadly described. The present embodiments are, therefore, to be considered in all respects as illustrative and not restrictive.

[1260] The present application claims priority from AU 2016900039 filed 7 Jan. 2016, AU 2016903541 filed 2 Sep. 2016, AU 2016903577 filed 6 Sep. 2016 and AU 2016904611 filed 11 Nov. 2016. The entire contents of each of which are incorporated herein by reference.

[1261] All publications discussed and/or referenced herein are incorporated herein in their entirety.

[1262] Any discussion of documents, acts, materials, devices, articles or the like which has been included in the present specification is solely for the purpose of providing a context for the present invention. It is not to be taken as an admission that any or all of these matters form part of the prior art base or were common general knowledge in the field relevant to the present invention as it existed before the priority date of each claim of this application.

### REFERENCES

[1263] Alemanno et al. (2008) Planta 227:853-866.
[1264] Almeida and Allshire (2005) TRENDS Cell Biol. 15:251-258.
[1265] Alonso et al. (2009) Plant Cell 21: 1747-1761.
[1266] Alonso et al. (2010) Green Chem. 12:1493-1513.
[1267] Alvarez et al. (2000) Theor. Appl. Genet. 100:319-327.
[1268] Andre at al (2012) Proc. Natl. Acad. Sci. U.S.A. 109:10107-10112.
[1269] Andrianov et al. (2010) Plant Biotech. J. 8:277-287.
[1270] Awai et al (2006) Biochem. Soc. Trans. 34:395-398.
[1271] Bartlett et al. (2008) Plant Methods 4:22.
[1272] Baud et al. (2007) Plant J. 50:825-838.
[1273] Baud and Lepiniec (2010) Progr. Lipid Res. 49: 235-249.
[1274] Baumlein et al. (1991) Mol. Gen. Genet. 225:459-467.
[1275] Baumlein et al. (1992) Plant J. 2:233-239.
[1276] Belide et al. (2013) Plant Cell Tiss. Org. Cult. DOI 10.1007/s11240-013-0295-1.
[1277] Ben Saad et al. (2011) Transgenic Res 20: 1003-1018.
[1278] Benning et al (2008) Prog. Lipid Res. 47:381-389.
[1279] Benning et al (2009) J. Biol. Chem 284:17420-17427.
[1280] Bibikova et al. (2002) Genetics 161:1169-1175.
[1281] Bihmidine et al. (2015) BMC Plant Biology 15:186.
[1282] Bihmidine et al. (2016) Plant Signaling & Behaviour 11: e1117721.
[1283] Bligh and Dyer (1959) Canadian Journal of Biochemistry and Physiology 37:911-917.
[1284] Bourque (1995) Plant Sci. 105:125-149.
[1285] Boutilier et al. (2002) Plant Cell 14:1737-1749.
[1286] Bouvier-Nave et al. (2000) European Journal of Biochemistry/FEBS 267:85-96.
[1287] Bradford (1976) Anal. Biochem. 72:248-254.
[1288] Braun & Slewinski (2010), Plant Physiol 153: 1940.
[1289] Broothaerts et al. (2005) Nature 433:629-633.
[1290] Broun et al. (1998) Plant J. 13:201-210.
[1291] Browse et al. (1986) Biochem J 235: 25-31.
[1292] Buchanan-Wollaston (1994) Plant Physiol. 105:839-846.
[1293] Busk et al. (1997) Plant J. 11:1285-1295.
[1294] Cao et al. (2007) J. Lipid Res. 48:583-591.
[1295] Capuano et al. (2007) Biotechnol. Adv. 25:203-206.
[1296] Chen et al (2011) Plant Physiol. 155:851-865.
[1297] Chikwamba et al. (2003) Proc. Natl. Acad. Sci. U.S.A. 100:11127-11132.
[1298] Christie (1993) Advances in Lipid Methodology-Two, Oily Press, Dundee, pp195-213.
[1299] Chung et al. (2006) BMC Genomics 7:120.
[1300] Comai et al. (2004) Plant J 37: 778-786.
[1301] Cong et al. (2013) Science 339:819-823.
[1302] Corrado and Karali (2009) Biotechnol. Adv. 27:733-743.
[1303] Coutu et al. (2007) Transgenic Res. 16:771-781.
[1304] Dahlqvist et al. (2000), Proc. Natl. Acad. Sci. U.S.A. 97: 6487-6492.
[1305] Damaj et al., (2010) Planta 231:1439-1458.
[1306] Dandik and Aksoy (1998) Fuel Process Technol. 57: 81-92.
[1307] Dauk et al (2007) Plant Sci. 173:43-49.
[1308] Dulermo and Nicaud (2011) Metab. Eng. 13:482-491.
[1309] Durrett et al. (2008) Plant J. 54:593-607.
[1310] Dyer et al. (2002) Plant Physiol. 130:2027-2038.
[1311] Eastmond et al. (2006) Plant Cell 18: 665-675.
[1312] Ellerstrom et al. (1996) Plant Mol. Biol. 32:1019-1027.
[1313] Endalew et al. (2011) Biomass and Bioenergy 35:3787-3809.
[1314] Fan et al. (2013) Plant Cell 25: 3506-3518.
[1315] Fan et al. (2013) Plant Journal 76: 930-942.
[1316] Fan et al. (2014) Plant Cell 26: 4119-4134.
[1317] Fan et al. (2015) Plant Cell 27: 2941-2955.
[1318] FAO Animal Production and Health Proceedings (2002) Protein sources for the animal feed industry, Expert Consultation and Workshop, Bangkok.
[1319] Feeney et al. (2012) Plant Physiol 162: 1881-1896.
[1320] Finkelstein et al. (1998) Plant Cell 10:1043-1054.
[1321] Froissard et al. (2009) FEMS Yeast Res 9:428-438.
[1322] Gan (1995) Molecular characterization and genetic manipulation of plant senescence. PhD thesis. University of Wisconsin, Madison.
[1323] Gan and Amasino (1995) Science 270:1986-1988.
[1324] Gazzarrini et al. (2004) Dev. Cell 7:373-385.
[1325] Ghosal et al. (2007) Biochimica et Biophysica Acta 1771:1457-1463.
[1326] Ghosh et al. (2009) Plant Physiol. 151:869-881.
[1327] Gidda et al (2013) Plant Signaling Behay. 8:e27141.
[1328] Girijashankar and Swathisree, (2009) Physiol. Mol. Biol. Plants 15: 287-302.
[1329] Gong and Jiang (2011) Biotechnol. Lett. 33:1269-1284.
[1330] Gould et al. (1991) Plant Physiol. 95:426-434.
[1331] Greenwell et al. (2010) J. R. Soc. Interface 7:703-726.
[1332] Guan et al. (2015) Lipids 50:407-416.
[1333] Gurel et al. (2009) Plant Cell Rep. 28:429-444.
[1334] Gutierrez et al. (2013) BMC Biotechnol. 13: 40.
[1335] Hedrich et al. (2015) Curr Opin Plant Biol 25: 63-70.
[1336] Hershey and Stoner (1991) Plant Mol. Biol. 17:679-690.
[1337] Hinchee et al. (1988) Biotechnology 6:915-922.
[1338] Horn et al. (2007) Euphytica 153:27-34.
[1339] Horn et al. (2013). Plant Physiol 162:1926-1936.
[1340] Horvath et al. (2000) Proc. Natl. Acad. Sci. U.S.A. 97:1914-1919.
[1341] Hsiao and Tzen (2011) Plant Physiol. Biochem. 49: 77-81.
[1342] Huang (1996) Plant Physiol. 110:1055-1061.
[1343] Huang and Huang (2016) Plant Physiol. 171: 1867-1878.
[1344] Ichihara et al (1988) Biochim. Biophys. Acta 958:125-129.
[1345] Ikeda et al. (2006) Pl Biotech J. 23: 153-161.
[1346] Iwabuchi et al. (2003) J. Biol. Chem. 278:4603-4610.
[1347] James et al. (2010) Proc. Natl. Acad. Sci. USA 107:17833-17838.
[1348] Jepson et al. (1994) Plant Mol. Biol. 26:1855-1866.
[1349] Jiang, et al. (2013) Nucleic Acids Research 41(20) e188.
[1350] Jolivet et al. (2014) Plant Physiol. Biochem. 42:501-509.
[1351] Jones et al. (1995) Plant Cell 7: 359-371.
[1352] Karmakar et al. (2010) Bioresource Technology 101:7201-7210.
[1353] Kelly et al. (2011) Plant Physiol. 157: 866-875.
[1354] Kelly et al (2013a) Plant Biotech. J. 11:355-361.
[1355] Kelly et al. (2013b) Plant Physiol. 162:1282-1289.
[1356] Kereszt et al. (2007) Nature Protocols 2:948-952.
[1357] Kim et al. (1996) Proc. Natl. Acad. Sci. USA 93:1156-1160.
[1358] Kim et al. (2016), Plant Physiol 171: 1951-1964.
[1359] Klemens et al. (2013) Plant Physiol 163: 1338-1352.
[1360] Koziel et al. (1996) Plant Mol. Biol. 32:393-405.
[1361] Kuhn et al. (2009) J. Biol. Chem. 284:34092-102.
[1362] Kunst et al. (1988) Proc. Natl. Acad. Sci. U.S.A. 85:4143-4147.
[1363] Kwong et al. (2003) Plant Cell 15:5-18.
[1364] Lacroix et al. (2008) Proc. Natl. Acad. Sci. U.S.A. 105: 15429-15434.
[1365] Laemmli (1970) Nature 227: 680-685.
[1366] Laibach et al. (2015). J. Biotechnol. 201: 15-27.
[1367] Lardizabal et al. (2008) Plant Physiol. 148: 89-96.
[1368] Larkin et al. (1996) Transgenic Res. 5:325-335.
[1369] Lebrun et al. (1987) Nucl. Acids Res. 15:4360.
[1370] Laux et al. (1996) Development 122: 87-96.
[1371] Lazo et al. (1991) Bio/Technology 9:963-967.
[1372] Lee et al. (1998) Science 280:915-918.
[1373] Lee et al. (2003) Proc. Natl. Acad. Sci. U.S.A. 100:2152-2158.
[1374] Li-Beisson et al (2013)_The Arabidopsis Book, 2013.
[1375] Li et al. (1996) FEBS Lett. 379:117-121.
[1376] Li et al. (2006) Phytochemistry 67: 904-915.
[1377] Li et al. (2016). Inter. J Agric. Biol. doi: 10.17957/IJAB/15.0075.
[1378] Lin et al. (2005) Plant Physiol. Biochem. 43:770-776.
[1379] Linder et al. (2005). FEMS Microbiol. Rev. 29: 877-896.
[1380] Liu and Godwin (2012). Plant Cell Reports 31, 999-1007.
[1381] Liu et al. (2010) Plant Physiol. Biochem. 48: 9-15.
[1382] Liu et al. (2012) J Exp Bot 63: 3727-3740.
[1383] Liu et al. (2014) BMC Plant Biol. 14: 73.
[1384] Liu et al. (2015). South African Journal of Botany 98, 157-160.
[1385] Lotan et al. (1998) Cell 93: 1195-1205.
[1386] Lu et al (2007)). Biol. Chem. 282: 35945-35953.
[1387] Lu et al. (2009) Proc Natl Acad of Sci USA 106:18837-18842.
[1388] Luerssen et al. (1998) Plant J. 15: 755-764.
[1389] Lui et al. (2009) J. Agric. Food Chem. 57: 2308-2313.
[1390] Ma et al. (2016) Plant Journal doi: 10.1111/tpj.13244.
[1391] MacEachran et al. (2010). Appl. Environ. Microbiol. 76: 7217-7225.
[1392] Maher and Bressler (2007) Bioresource Technology 98:2351-2368.
[1393] Matsuoka et al. (1994) Plant J. 6:311-319.
[1394] Matsuoka and Minami (1989) Eur. J. Biochem. 181: 593-598.
[1395] McCleary et al. (2013) J AOAC Int 93:221-233.
[1396] McCleary et al. (2015) Starch 67:860-883.
[1397] McElroy et al. (1990) Plant Cell 2: 163-171.
[1398] McKinley et al. (2016) Plant Journal: doi:10.1111/tpj.13269.
[1399] Meier et al. (1997) FEBS Lett. 415:91-95.
[1400] Millar and Waterhouse (2005). Funct Integr Genomics 5:129-135.
[1401] Miller (1984). Crop Sci 24:1224-1224.
[1402] Mizuno et al., (2016) Biotechnol Biofuels 9: 127.
[1403] Mojica et al. (2000) Mol Microbiol 36:244-246.
[1404] Mongrand et al. (1998) Phytochemistry 49:1049-1064.
[1405] Moreno-Perez (2012) PNAS 109:10107-10112.
[1406] Moyle and Birch (2013) Theor. Appl. Genet. 126:1775-1782.
[1407] Mu et al. (2008) Plant Physiol. 148:1042-1054.
[1408] Mudge et al., (2013) Plant Biotechnol. J. 11:502-509.
[1409] Murashige and Skoog (1962). Physiol Plant 15:473-497.
[1410] Murphy et al. (2012). Protoplasma 249:541-585.
[1411] Naim et al. (2012) PLoS One 7: e52717.
[1412] Needleman and Wunsch (1970) J. Mol Biol. 45: 443-453.
[1413] Nilsson et al. (2012) Physiol. Plantarum 144: 35-47.
[1414] Nishida et al (1993) Plant Mol. Biol. 21:267-277.
[1415] Nomura et al. (2000) Plant Mol. Biol. 44: 99-106.
[1416] Ohlrogge and Browse (1995) Plant Cell 7: 957-970.
[1417] Padidam (2003) Curr. Opin. Plant Biol. 6:169-77.
[1418] Padidam et al. (2003) Transgenic Res. 12:101-9.
[1419] Parthibane et al. (2012a) J. Biol. Chem. 287:1946-1965.
[1420] Parthibane et al. (2012b) Plant Physiol. 159:95-104.
[1421] Pasquinelli et al. (2005). Curr. Opin. Genet. Develop. 15:200-205.
[1422] Perez-Vich et al. (1998) J.A.O.C.S. 75:547-555.
[1423] Perrin et al. (2000) Mol. Breed. 6:345-352.
[1424] Petrie et al. (2012) PLOS One 7: e35214.
[1425] Phillips et al. (2002) Journal of Food Composition and Analysis 12:123-142.
[1426] Potenza et al. (2004) In Vitro Cell Dev. Biol. Plant 40:1-22.
[1427] Prosky et al. (1985) J AOAC Chem 68:677-679.
[1428] Qazi et al. (2012) Journal of Plant Physiology 169: 605-613.
[1429] Qiu et al. (2001) J. Biol. Chem. 276:31561-3156.
[1430] Robson et al. (2004) Plant Biotechnol J 2:101-112.
[1431] Rossell and Pritchard (1991) Analysis of Oilseeds, Fats and Fatty Foods. Elsevier Sanjaya et al. (2011) Plant Biotech J. 9:874-883.
[1432] Schneider et al. (2012) Plant Biol 14: 325-336.
[1433] Science Publishers Ltd: London (Chapter 2, pp. 48-53).
[1434] Roston et al (2012) J. Biol. Chem. 287:21406-21415.
[1435] Ruuska et al. (2002) Plant Cell 14:1191-1206.
[1436] Saha et al. (2006) Plant Physiol. 141:1533-1543.
[1437] Sanjaya et al. (2011) Plant Biotechnol J 9:874-883.
[1438] Santos-Mendoza et al. (2005) FEBS Lett. 579:4666-4670.
[1439] Santos-Mendoza et al. (2008) Plant J. 54:608-620.
[1440] Schnurr et al. (2002) Plant Physiol 129:1700-1709.
[1441] Scott et al. (2010) Plant Biotechnol. J. 8:912-27.
[1442] Shaw et al. (1959) J Soil Sci 10:316-326.
[1443] Shen et al. (2010) Plant Phys. 153: 980-987.
[1444] Shen et al. (2014). Biochem. Biophys. Res. Comm. 448: 365-371.
[1445] Semwal et al. (2011) Bioresource Technology 102:2151-2161.
[1446] Senior (1998) Biotech. Genet. Engin. Revs. 15:79-119.
[1447] Shen et al. (2010) Plant Physiol. 153:980-987.
[1448] Shiina et al. (1997) Plant Physiol. 115:477-483.
[1449] Shimada and Hara-Nishimura (2010) Biol. Pharm. Bull. 33:360-363.
[1450] Shimada et al. (2014) Plant Physiol. 164:105-118.
[1451] Shockey et al. (2002) Plant Physiol 129:1710-1722.
[1452] Slade and Knauf (2005) Transgenic Res. 14: 109-115.
[1453] Slocombe et al. (2009) Plant Biotechnol. J. 7: 694-703.
[1454] Smith et al. (2000) Nature 407:319-320.
[1455] Somerville et al. (2000) Lipids. In BB Buchanan, W Gruissem, R L Jones, eds, Biochemisty and Molecular Biology of Plants. American Society of Plant Physiologists, Rockville, Md., pp 456-527.
[1456] Srinivasan et al. (2007) Planta 225:341-51.
[1457] Stalker et al. 1988 Science 242: 419-423.
[1458] Stone et al. (2001) Proc. Natl. Acad. Sci. U.S.A. 98: 11806-11811.
[1459] Stone et al. (2008) Proc. Natl. Acad. Sci. U.S.A. 105: 3151-3156.
[1460] Tai et al. (2002). Biosci. Biotechnol. Biochem. 66: 2146-2153.
[1461] Tan et al. (2011) Plant Physiol. 156:1577-1588.
[1462] Taylor (1997) The Plant Cell 9:1245-1249.
[1463] Thillet et al. (1988) J. Biol. Chem 263:12500-12508.
[1464] Tingay et al. (1997) Plant J. 11:1369-1376.
[1465] To et al. (2012) Plant Cell 24:5007-5023.
[1466] Ulmasov et al. (1995) Plant Physiol. 108:919-927. van de Loo et al. (1995) Proc Natl Acad Sci USA. 92:6743-6747.
[1467] Vanhercke et al. (2013) FEBS Letters 587:364-369.
[1468] Vanhercke et al. (2014). Plant Biotech. J. 12:231-239.
[1469] Vieler et al. (2012) Plant Physiol. 158:1562-1569.
[1470] Voinnet et al. (2003) Plant J. 33:949-956.
[1471] Wang and Benning (2012) Plant J 70:614-623.
[1472] Wang et al. (2002) Plant J 32:831-843.
[1473] Waterhouse et al. (1998). Proc. Natl. Acad. Sci. U.S.A. 95:13959-13964.
[1474] Weissbach and Weissbach, (1989) Methods for Plant Mol Biol, Academic Press.
[1475] Weissbach et al., In: Methods for Plant Molecular Biology, Academic Press, San Diego, Calif., (1988).
[1476] Winichayakul et al. (2013) Plant Physiol. 162:626-639.
[1477] Wood et al. (2009) Plant Biotech. J. 7: 914-924.
[1478] Wormit et al. (2006) Plant Cell 18: 3476-3490.
[1479] Wright et al. (2006) Methods Mol Biol. 343:120-135.
[1480] Wu et al. (2014) In Vitro Cellular and Dev. Biol.-Plant 50:9-18.
[1481] Xie et al. (2014) Mol. Plant 7:923-926.
[1482] Xu et al (2010) Plant and Cell Physiol. 51:1019-1028.
[1483] Xu et al (2005) Plant Cell 17:3094-3110.
[1484] Xu et al (2008) Plant Cell 20:2190-2204.
[1485] Yamagishi et al. (2005) Pl Physiol 139: 163-173.
[1486] Yamasaki et al. (2004) Plant Cell 16:3448-3459.
[1487] Yang et al. (2003) Planta 216:597-603.
[1488] Yang et al. (2010) Proc. Natl. Acad. Sci. U.S.A. 107:12040-12045.
[1489] Yen et al. (2002) Proc. Natl. Acad. Sci. U.S.A. 99:8512-8517.
[1490] Yen et al. (2005) J. Lipid Res. 46: 1502-1511.
[1491] Yokoyama et al. (1994) Mol Gen Genet 244: 15-22.
[1492] Zale et al. (2016), Plant Biotech J. 14: 661-669.
[1493] Zheng et al. (2009) Pl Physiol 21: 2563-2577.
[1494] Zolman et al (2001) Plant Physiol. 127:1266-1274.

The application's sequence listing, which the Patent Office published only in electronic form, follows.

SEQUENCE LISTING (314 sequences)

SEQ ID NO: 1 - protein, 520 aa, Arabidopsis thaliana
MAILDSAGVTTVTENGGGEFVDLDRLRRRKSRSDSSNGLLLSGSDNNSPSDDVGAPADVRDRIDSVVNDDAQGTANLAGDNNGGGDNNGGGRGGGEGRGNADATFTYRPSVPAHRRARESPLSSDAIFKQSHAGLFNLCVVVLIAVNSRLIIENLMKYGWLIRTDFWFSSRSLRDWPLFMCCISLSIFPLAAFTVEKLVLQKYISEPVVIFLHIIITMTEVLYPVYVTLRCDSAFLSGVTLMLLTCIVWLKLVSYAHTSYDIRSLANAADKANPEVSYYVSLKSLAYFMVAPTLCYQPSYPRSACIRKGWVARQFAKLVIFTGFMGFIIEQYINPIVRNSKHPLKGDLLYAIERVLKLSVPNLYVWLCMFYCFFHLWLNILAELLCFGDREFYKDWWNAKSVGDYWRMWNMPVHKWMVRHIYFPCLRSKIPKTLAIIIAFLVSAVFHELCIAVPCRLFKLWAFLGIMFQVPLVFITNYLQERFGSTVGNMIFWFIFCIFGQPMCVLLYYHDLMNRKGSMS

SEQ ID NO: 2 - protein, 314 aa, Arabidopsis thaliana
MGGSREFRAEEHSNQFHSIIAMAIWLGAIHFNVALVLCSLIFLPPSLSLMVLGLLSLFIFIPIDHRSKYGRKLARYICKHACNYFPVSLYVEDYEAFQPNRAYVFGYEPHSVLPIGVVALCDLTGFMPIPNIKVLASSAIFYTPFLRHIWTWLGLTAASRKNFTSLLDSGYSCVLVPGGVQETFHMQHDAENVFLSRRRGFVRIAMEQGSPLVPVFCFGQARVYKWWKPDCDLYLKLSRAIRFTPICFWGVFGSPLPCRQPMHVVVGKPIEVTKTLKPTDEEIAKFHGQYVEALRDLFERHKSRVGYDLELKIL

SEQ ID NO: 3 - protein, 340 aa, Ricinus communis
MGEEANHNNNNNNINSNDEKNEEKSNYTVVNSRELYPTNIFHALLALSIWIGSIHFNLFLLFISYLFLSFPTFLLIVGFFVVLMFIPIDEHSKLGRRLCRYVCRHACSHFPVTLHVEDMNAFHSDRAYVFGYEPHSVFPLGVSVLSDHFAVLPLPKMKVLASNAVFRTPVLRHIWTWCGLTSATKKNFTALLASGYSCIVIPGGVQETFYMKHGSEIAFLKARRGFVRVAMEMGKPLVPVFCFGQSNVYKWWKPDGELFMKIARAIKFSPIVFWGVLGSHLPLQRPMHVVVGKPIEVKQNPQPTVEEVSEVQGQFVAALKDLFERHKARVGYADLTLEIL

SEQ ID NO: 4 - protein, 322 aa, Vernicia fordii
MGMVEVKNEEEVTIFKSGEIYPTNIFQSVLALAIWLGSFHFILFLVSSSIFLPFSKFLLVIGLLLFFMVIPINDRSKLGQCLFSYISRHVCSYFPITLHVEDINAFRSDRAYVFGYEPHSVFPIGVMILSLGLIPLPNIKFLASSAVFYTPFLRHIWSWCGLTPATRKNFVSLLSSGYSCILVPGGVQETFYMKQDSEIAFLKARRGFIRIAMQTGTPLVPVFCFGQMHTFKWWKPDGELFMKIARAIKFTPTIFWGVLGTPLPFKNPMHVVVGRPIEVKQNPQPTAEEVAEVQREFIASLKNLFERHKARVGYSDLKLEIF

SEQ ID NO: 5 - protein, 355 aa, Mortierella ramanniana
MASKDQHLQQKVKHTLEAIPSPRYAPLRVPLRRRLQTLAVLLWCSMMSICMFIFFFLCSIPVLLWFPIILYLTWILVWDKAPENGGRPIRWLRNAAWWKLFAGYFPAHVIKEADLDPSKNYIFGYHPHGIISMGSFCTFSTNATGFDDLFPGIRPSLLTLTSNFNIPLYRDYLMACGLCSVSKTSCQNILTKGGPGRSIAIVVGGASESLNARPGVMDLVLKRRFGFIKIAVQTGASLVPTISFGENELYEQIESNENSKLHRWQKKIQHALGFTMPLFHGRGVFNYDFGLLPHRHPIYTIVGKPIPVPSIKYGQTKDEIIRELHDSYMHAVQDLYDRYKDIYAKDRVKELEFVE

SEQ ID NO: 6 - protein, 388 aa, Homo sapiens
MKTLIAAYSGVLRGERQAEADRSQRSHGGPALSREGSGRWGTGSSILSALQDLFSVTWLNRSKVEKQLQVISVLQWVLSFLVLGVACSAILMYIFCTDCWLIAVLYFTWLVFDWNTPKKGGRRSQWVRNWAVWRYFRDYFPIQLVKTHNLLTTRNYIFGYHPHGIMGLGAFCNFSTEATEVSKKFPGIRPYLATLAGNFRMPVLREYLMSGGICPVSRDTIDYLLSKNGSGNAIIIVVGGAAESLSSMPGKNAVTLRNRKGFVKLALRHGADLVPIYSFGENEVYKQVIFEEGSWGRWVQKKFQKYIGFAPCIFHGRGLFSSDTWGLVPYSKPITTVVGEPITIPKLEHPTQQDIDLYHTMYMEALVKLFDKHKTKFGLPETEVLEVN

SEQ ID NO: 7 - protein, 328 aa, Homo sapiens
MAHSKQPSHFQSLMLLQWPLSYLAIFWILQPLFVYLLFTSLWPLPVLYFAWLFLDWKTPERGGRRSAWVRNWCVWTHIRDYFPITILKTKDLSPEHNYLMGVHPHGLLTFGAFCNFCTEATGFSKTFPGITPHLATLSWFFKIPFVREYLMAKGVCSVSQPAINYLLSHGTGNLVGIVVGGVGEALQSVPNTTTLILQKRKGFVRTALQHGAHLVPTFTFGETEVYDQVLFHKDSRMYKFQSCFRRIFGFYCCVFYGQSFCQGSTGLLPYSRPIVTVVGEPLPLPQIEKPSQEMVDKYHALYMDALHKLFDQHKTHYGCSETQKLFFL

SEQ ID NO: 8 - protein, 361 aa, Bos taurus
MKTLIAAYSGVLRGTGSSILSALQDLFSVTWLNRAKVEKQLQVISVLQWVLSFLVLGVACSVILMYTFCTDCWLIAVLYFTWLVFDWNTPKKGGRRSQWVRNWAVWRYFRDYFPIQLVKTHNLLTSRNYIFGYHPHGIMGLGAFCNFSTEATEVSKKFPGIRPYLATLAGNFRMPVLREYLMSGGICPVNRDTIDYLLSKNGSGNAIIIVVGGAAESLSSMPGKNAVTLRNRKGFVKLALRHGADLVPTYSFGENEVYKQVIFEEGSWGRWVQKKFQKYIGFAPCIFHGRGLFSSDTWGLVPYSKPITTVVGEPITIPRLERPTQQDIDLYHAMYVQALVKLFDQHKTKFGLPETEVLEVN

SEQ ID NO: 9 - protein, 388 aa, Mus musculus
MKTLIAAYSGVLRGERRAEAARSENKNKGSALSREGSGRWGTGSSILSALQDIFSVTWLNRSKVEKQLQVISVLQWVLSFLVLGVACSVILMYTFCTDCWLIAVLYFTWLAFDWNTPKKGGRRSQWVRNWAVWRYFRDYFPIQLVKTHNLLTTRNYIFGYHPHGIMGLGAFCNFSTEATEVSKKFPGIRPYLATLAGNFRMPVLREYLMSGGICPVNRDTIDYLLSKNGSGNAIIIVVGGAAESLSSMPGKNAVTLKNRKGFVKLALRHGADLVPTYSFGENEVYKQVIFEEGSWGRWVQKKFQKYIGFAPCIFHGRGLFSSDTWGLVPYSKPITTVVGEPITVPKLEHPTQKDIDLYHAMYMEALVKLFDNHKTKFGLPETEVLEVN

SEQ ID NO: 10 - protein, 3 aa, Artificial Sequence
  conserved sequence
YFP

SEQ ID NO: 11 - protein, 4 aa, Artificial Sequence
  conserved sequence
HPHG

SEQ ID NO: 12 - protein, 4 aa, Artificial Sequence
  conserved sequence
EPHS

SEQ ID NO: 13 - protein, 24 aa, Artificial Sequence
  conserved sequence
  X (2)..(2): any amino acid
  X (5)..(5): any amino acid
  X (6)..(6): Lysine (K) or Arginine (R)
  X (7)..(7): any amino acid
  X (9)..(11): any amino acid
  X (13)..(15): any amino acid
  X (16)..(16): Leucine (L) or Valine (V)
  X (19)..(21): any amino acid
  X (24)..(24): Glutamic Acid (E) or Glutamine (Q)
RXGFXXXAXXXGXXXXVPXXXFGX

SEQ ID NO: 14 - protein, 8 aa, Artificial Sequence
  conserved sequence
  X (3)..(3): any amino acid
  X (5)..(7): any amino acid
FLXLXXXN

SEQ ID NO: 15 - protein, 118 aa, Artificial Sequence
  conserved sequence
ALVVANHQSFLDPLVLSALLPRKGGRVRFVAKKELFYVPLLGWLLRLLGAIFIDRENGRLARAALREAVRLLRDGGWLLIFPEGTRSRPGKLLPFKKGAARLALEAGVPIVPVAIRGT

SEQ ID NO: 16 - protein, 187 aa, Artificial Sequence
  conserved sequence
  X (15)..(15): any amino acid
  X (18)..(18): any amino acid
  X (23)..(23): any amino acid
  X (25)..(26): any amino acid
  X (28)..(30): any amino acid
  X (32)..(33): any amino acid
  X (35)..(38): any amino acid
  X (41)..(41): any amino acid
  X (46)..(48): any amino acid
  X (53)..(53): any amino acid
  X (55)..(57): any amino acid
  X (61)..(61): any amino acid
  X (67)..(67): any amino acid
  X (72)..(72): any amino acid
  X (74)..(77): any amino acid
  X (79)..(79): any amino acid
  X (114)..(114): any amino acid
  X (127)..(128): any amino acid
  X (136)..(136): any amino acid
  X (139)..(142): any amino acid
  X (144)..(144): any amino acid
  X (150)..(150): any amino acid
  X (164)..(165): any amino acid
  X (167)..(172): any amino acid
AVFDKDGTLTEDDTXFLXYLLKXLXXLXXXLXXDXXXXGSXLTLSXXXDLLEXLXXXGGIXVIGLAXRYLEXLXXXXEXAKLFEGFIKPDAAELLKELHEAGLRVVVLTGDPRXIAKPVAKELGIDXXNVLATELXDEXXXXVXGRITGXLDKARAVERLVVLXXKXXXXXXVVAIGDSANDLPALK

SEQ ID NO: 17 - protein, 190 aa, Artificial Sequence
  conserved sequence
IKAVVFDKDGTLTDGEPPIAEAIVEAAAELGLPLLLPLEEVEKLLGRGVEGIERILLEGGLTAELLLELEGELAAGKTAVLVALDGEVLGLIALADKLYPGAREALKALKERGIKVAILTNGDRANAEAVLEALGLADLFDVIVDSDDVGPVKPKPEIFLKALERLGVKPEEVLMVGDGVNDAPALAAAG

SEQ ID NO: 18 - protein, 15 aa, Artificial Sequence
  conserved sequence
GDLVICPEGTTCREP

SEQ ID NO: 19 - protein, 6 aa, Artificial Sequence
  conserved sequence
  X (2)..(2): any amino acid
  X (4)..(4): any amino acid
  X (5)..(5): Threonine (T) or Valine (V)
  X (6)..(6): Leucine (L) or Valine (V)
DXDXXX

SEQ ID NO: 20 - protein, 8 aa, Artificial Sequence
  conserved sequence
  X (2)..(2): 17 to 20 amino acids; where the amino acids can be any amino acids
  X (3)..(3): Glycine (G) or Serine (S)
  X (4)..(4): Aspartic Acid (D) or Serine (S)
  X (5)..(7): any amino acid
  X (8)..(8): Aspartic Acid (D) or Asparagine (N)
KXXXXXXX

SEQ ID NO: 21 - protein, 356 aa, Arabidopsis thaliana
MDWEIRGSSLGQKLLEFDSEQERQTRFRAYDSEEAAAHTYDLAALKYWGPDTILNFPAETYTKELEEMQRVTKEEYLASLRRQSSGFSRGVSKYRGVARHHHNGRWEARIGRVFGNKYLYLGTYNTQEEAAAAYDMAAIEYRGANAVTNFDISNYIDRLKKKGVFPFPVNQANHQEGILVEAKQEVETREAKEEPREEVKQQYVEEPPQEEEEKEEEKAEQQEAEIVGYSEEAAVVNCCIDSSTIMEMDRCGDNNELAWNFCMMDTGFSPFLTDQNLANENPIEYPELFNELAFEDNIDFMFDDGKHECLNLENLDCCVVGRESPPSSSSPLSCLSTDSASSTTTTTTSVSCNYLV

SEQ ID NO: 22 - protein, 430 aa, Arabidopsis thaliana
MKKRLTTSTCSSSPSSSVSSSTTTSSPIQSEAPRPKRAKRAKKSSPSGDKSHNPTSPASTRRSSIYRGVTRHRWTGRFEAHLWDKSSWNSIQNKKGKQVYLGAYDSEEAAAHTYDLAALKYWGPDTILNFPAETYTKELEEMQRVTKEEYLASLRRQSSGFSRGVSKYRGVARHHHNGRWEARIGRVFGNKYLYLGTYNTQEEAAAAYDMAAIEYRGANAVTNFDISNYIDRLKKKGVFPFPVNQANHQEGILVEAKQEVETREAKEEPREEVKQQYVEEPPQEEEEKEEEKAEQQEAEIVGYSEEAAVVNCCIDSSTIMEMDRCGDNNELAWNFCMMDTGFSPFLTDQNLANENPIEYPELFNELAFEDNIDFMFDDGKHECLNLENLDCCVVGRESPPSSSSPLSCLSTDSASSTTTTTTSVSCNYLV

SEQ ID NO: 23 - protein, 430 aa, Arabidopsis lyrata
MKRRLTTSTSSSSPSSSVSSSTTTSSPIQSEAPRPKRAKRAKKSSPSGDKSHNPTSPASTRRSSIYRGVTRHRWTGRFEAHLWDKSSWNSIQNKKGKQGAYDSEEAAAHTYDLAALKYWGPDTILNFPAETYTKELEEMQRVTKEEYLASLRRQSSGFSRGVSKYRGVARHHHNGRWEARIGRVFGNKYLYLGTYNTQEEAAAAYDMAAIEYRGANAVTNFDISNYIDRLKKKGVFPFPVNQPNHQEAILVEAKQEIETREAKEEPREEVKQQYVEEPPQEEKEEEKAEQQEAEFVGYKDEGAVVNCCIDSSAIMEMNRCGDNNELAWNFCMMDSGFAPFLTDQNLSNENPIEYPELFNELAFEDNIDFMFDEAKNDCLSLENLDCCVVGRESPTSSSSPLSCFSTDSASSTTTTTSVSCNYLGLFVGSE

SEQ ID NO: 24 - protein, 413 aa, Brassica napus
MKRPLTTSPSSSSSTSSSACILPTQSETPRPKRAKRAKKSSLRSDVKPQNPTSPASTRRSSIYRGVTRHRWTGRYEAHLWDKSSWNSIQNKKGKQVYLGAYDSEEAAAHTYDLAALKYWGPNTILNFPVETYTKELEEMQRCTKEEYLASLRRQSSGFSRGVSKYRGVARHHHNGRWEARIGRVFGNKYLYLGTYNTQEEAAAAYDMAAIEYRGANAVTNFDIGNYIDRLKKKGVFPFPVSQANHQEAVLAETKQEVEAKEEPTEEVKQCVEKEEAKEEKTEKKQQQEVEEAVITCCIDSSESNELAWDFCMMDSGFAPFLTDSNLSSENPIEYPELFNEMGFEDNIDFMFEEGKQDCLSLENLDCCDGVVVVGRESPTSLSSSPLSCLSTDSASSTTTTATTVTSVSWNYSV

SEQ ID NO: 25 - protein, 415 aa, Brassica napus
MKRPLTTSPSTSSSTSSSACILPTQPETPRPKRAKRAKKSSIPTDVKPQNPTSPASTRRSSIYRGVTRHRWTGRYEAHLWDKSSWNSIQNKKGKQVYLGAYDSEEAAAHTYDLAALKYWGPDTILNFPAETYTKELEEMQRCTKEEYLASLRRQSSGFSRGVSKYRGVARHHHNGRWEARIGRVFGNKYLYLGTYNTQEEAAAAYDMAAIEYRGANAVTNFDISNYIDRLKKKGVFPFPVSQANHQEAVLAEAKQEVEAKEEPTEEVKQCVEKEEPQEAKEEKTEKKQQQQEVEEAVVTCCIDSSESNELAWDFCMMDSGFAPFLTDSNLSSENPIEYPELFNEMGFEDNIDFMFEEGKQDCLSLENLDCCDGVVVVGRESPTSLSSSPLSCLSTDSASSTTTTTITSVSCNYSV

SEQ ID NO: 26 - protein, 285 aa, Glycine max
MKRSPASSCSSSTSSVGFEVHHPIEKRRPKHPRRNNLKSQKCKQNQTTTGGRRSSIYRGVTRHRWTGRFEAHLWDKSSWNNIQSKKGKQVYLGAYDTEESAARTYDLAALKYWGKDATLNFPIETYTKDLEEMDKVSREEYLASLRRQSSGFSRGISKYRGVARHHHNGRWEARIGRVCGNKYLYLGTYKTQEEAAVAYDMAAIEYRGVNAVTNFDISNYMDKIKKKNDQTLQQQQTEVQTETVPNSSDSEEAEVEQQHTTTITTPPPSENLHMLPQEHQVGGWV

SEQ ID NO: 27 - protein, 417 aa, Jatropha curcas
MKRSSASSCSSSSSSSSSPSSSSSSACSASSSCLDSVSPPNHHQLRSEKSKSKRIRKIQTKQDKCQTTATTTSPSGGGRRSSIYRGVTRHRWTGRFEAHLWDKSSWNNIQNKKGRQVYLGAYDNEEAAAHTYDLAALKYWGQDTTLNFPIETYSKELEEMQKMSKEEYLASLRRRSSGFSRGVSKYRGVARHHHNGRWEARIGRVFGNKYLYLGTYNTQEEAAAAYDMAAIEYRGANAVTNFDVSHYIDRLKKKGIPLDKILPETLSKGSKESEEIERTSPLPLPSPPSPSITPLHEEIVSPQLLETECPQHPPCMDTCTMIVMDPIEEHELTWSFCLDSGLVPLPVPDLPLANGCELPDLLDDTGFEDNIDLIFDACCFGNDANPADENGKERLSSASTSPSCSTTLTSVSCNYSV

SEQ ID NO: 28 - protein, 443 aa, Ricinus communis
MKRSPTSPCSSSSSSSYSSSSASSSCVGPDDTPVAPGSHHHHDHHQLRSQKSSKRIRKVKKKQQNHNIDQNNTNTTITAPTSARRSSIYRGVTRHRWTGRFEAHLWDKSSWNNIQNKKGRQGAYDNEEAAAHTYDLAALKYWGPETTLNFPIETYPKELEEMQKMSKEEYLASLRRQSSGFSRGVSKYRGVARHHHNGRWEARIGRVFGNKYLYLGTYNTQEEAAAAYDMAAIEYRGANAVTNFDISNYIDRLKKKGILLDQILPDQPLRKCSSESEEAEAEAEVERLPSLPSSILPQEQDTISPQLQCTQLLPSMDSCTMINMDPIEDNELTWSFCLDSGLTLFSVPELPLENACELPDLFDDTGFEDNIDLIFDGCCFGNDDDGGGGANHQEFMVESRGCRVGEVGISGSMEEENGKEMCCSSSSPSCSTTTSVSCCNYSV

SEQ ID NO: 29 - protein, 402 aa, Populus trichocarpa
MKRSSSCSSSSSSSSSSCVASESIHKPKAKRIRKNQKSNQGKSQNAAAAAANNSHNSGKRSSIYRGVTRHRWTGRFEAHLWDKSSWNSIQNKKGKQGAYDNEEAAAHTYDLAALKYWGSETTLNFPIETYTKEIEEMQKVTKEEYLASLRRQSSGFSRGVSKYRGVARHHHNGRWEARIGRVYGNKYLYLGTYNTQEEAAAAYDMAAIQYRGANAVTNFDVSNYIERLRKKGIPIDRILQEQQLLNNSVDSSVEVEVEQPTPPPQQQQEEQEQKIVSSSSQLQCSQLNSSLDGTPPMVIMDTIEEHELAWSFCMDSGLSLTMPDLPLENSCELPDLFDHTGFEDNIDLIFDACCYGKEANPAGYTLEDNSTGGVEEDRLSSDSVSNSPTSSTTTSVSCNYSV

SEQ ID NO: 30 - protein, 409 aa, Vitis vinifera
MVKRSSPGSSSSPSSSSTSSDAASRPAPPSGGKPKSRKKEAKKNSNGNGSNSKNKRTSIYRGVTKHRWTGRFEAHLWDKSSWNDISNKRGRQGAYYNEEAAARTYDLAALKYWGPTTPLNFPLETYQKDAEEMEKMSKEEYLALLRRQSNGFSRGVSKHHHNGRWEARIGRVLGNKYLYLGTYSTQEEAAAAYDMAAIEYRGLNAVTNFDISNYVKLGRVEAQVQELAQQLQPNTPIGPQNELQKEEEEQLQEPVLSSSQHLPSMDSSAMEIMDPADDPDLPWNFCAYSTLLVPDVPLGKGGELSDLFYEKGFEDNIDYMFEGAAGNEEESNSAENGVKENGFMHELEVDGKLQNVVGFFFLSFFFLPKRAGIRKRGVDSCMQLFLYFVFLFYPFLPEVSKFLFHLSLD

SEQ ID NO: 31 - protein, 420 aa, Brachypodium distachyon
MKRSPPQPSPSPSSSPASSSSSPSSSDSSSSIAIPRKRARTAAAAAGGGKARAAAAKRPKKDGKDSGSSSNGGGGGGGKRSSIYRGVTRHRWTGRFEAHLWDKNCFTSLQNKKKGRQVYLGAYDTEEAAARAYDLAALKYWGPETTLNFSADDYGKERSEMEAVSREEYLAALRRRSSGFSRGVSKYRGVARHHHNGRWEARIGRVLGNKYLYLGTFDTQEEAARAYDLAAIQYRGANAVTNFDISRYLDQPQLLEQLQQQQGPQVVAALQEEAQRDHQSDNAVQELNSGEAQTPGGIDEPIAIGDSTEDINTSLTVDDIIEESLWSPYEFDIMAGVNVSNSMNLSELFSDVAFEGNIGCLFEECSGIDDCSSRHGAGLAAFGLFTEGDDKLKDVSEMEMEVNPQANDVSCPPKMITVCN

SEQ ID NO: 32 - protein, 423 aa, Hordeum vulgare
MKRSPPPQPSPSSSPACSPSPSSPSSSDSSSIAIPRKRARTQKAGSAKAKAAPKRAKKDSGRSTKDSDASANGAAASGKRSSIYRGVTRHRWTGRFEAHLWDKNCFTSIQNKKKGRQVYLGAYDTEEAAARAYDLAALKYWGPETTLNFTVDEYAKERSEMEAVSREEYLAALRRRSSGFSRGVSKYRGVARHHHNGRWEARIGRVLGNKYLYLGTFDTQEEAARAYDLAAIEYRGANAVTNFDISRYLDQPQLLAQLEQGPQVVPALQEELQHDHQSDNAVQELNSGEAQKPGSVSEPIAVDDTDNTGDIGAPLVFDSGVEENLWSPCMDYDVDPIFGPNISSSMNLSEWFNDPAFESNIGYMFEGCSDVDDCSTRHGAGLSALGFLKEGDDKLKDGSDMEAEITPQANDVSCPPKMITVCN

SEQ ID NO: 33 - protein, 443 aa, Oryza sativa
MAKRSSPDPASSSPSASSSPSSPSSSSSEDSSSPMSMPCKRRARPRTDKSTGKAKRPKKESKEVVDPSSNGGGGGKRSSIYRGVTRHRWTGRFEAHLWDKNCSTSLQNKKKGRQGAYDSEEAAARAYDLAALKYWGPETVLNFPLEEYEKERSEMEGVSREEYLASLRRRSSGFSRGVSKYRGVARHHHNGRWEARIGRVLGNKYLYLGTFDTQEEAAKAYDLAAIEYRGANAVTNFDISCYLDQPQLLAQLQQEPQLLAQLQQEPQVVPALHEEPQDDDRSENAVQELSSSEANTSSDNNEPLAADDSAECMNEPLPIVDGIEESLWSPCLDYELDTMPGAYFSNSMNFSEWFNDEAFEGGMEYLFEGCSSITEGGNSMDNSGVTEYNLFEECNMLEKDISDFLDKDISDFLDKDISISDGERISPQANNISCPQKMISVCN

SEQ ID NO: 34 - protein, 420 aa, Sorghum bicolor
MDMERSQQQKSPTESPPPPSPSSSSSSVSADTVLPPPGKRRRAATTAKAKAGAKPKRARKDAAAAADPPPPPAAAAAGKRSSVYRGVTRHRWTGRFEAHLWDKHCLAALHNKKKGRQVYLGAYDSEEAAARAYDLAALKYWGPETLLNFPVEDYSSEMPEMEGVSREEYLASLRRRSSGFSRGVSKYRGVARHHHNGRWEARIGRVFGNKYLYLGTFDTQEEAAKAYDLAAIEYRGVNAVTNFDISCYLDHPLFLAQLQQEPQVVPALNQEAQPDQSETETIAQESVSSEAKTPDDNAEPDDNAEPDDIAEPLITVDDSIEESLWSPCMDYELDTMSRSNFGSSINLSEWFNDADFDSNIGCLFDGCSAVDEGGKDGVGLADFSLLEDFSLFEAGDGQLKDVLSDMEEGIQPPTMISVCN

SEQ ID NO: 35 - protein, 395 aa, Zea mays
MERSQRQSPPPPSPSSSSSSVSADTVLVPPGKRRRAATAKAGAEPNKRIRKDPAAAAAGKRSSVYRGVTRHRWTGRFEAHLWDKHCLAALHNKKKGRQVYLGAYDSEEAAARAYDLAALKYWGPETLLNFPVEDYSSEMPEMEAVSREEYLASLRRRSSGFSRGVSKYRGVARHHHNGRWEARIGRVFGNKYLYLGTFDTQEEAAKAYDLAAIEYRGVNAVTNFDISCYLDHPLFLAQLQQEPQVVPALNQEPQPDQSETGTTEQEPESSEAKTPDGSAEPDENAVPDDTAEPLSTVDDSIEEGLWSPCMDYELDTMSRPNFGSSINLSEWFADADFDCNIGCLFDGCSAADEGSKDGVGLADFSLFEAGDVQLKDVLSDMEEGIQPPAMISVCN

SEQ ID NO: 36 - protein, 413 aa, Brachypodium distachyon
MEAYCSTLVKDELINGGGGGSAGGMRYCEAAPRVSPPVAIKSVKRRKREPPAVSGMTTVSGGGKDGDKSAGNAAAKRSSRFRGVSRHRWTGRFEAHLWDKGTWNPTQKKKGKQVYLGAYNEEEAAARAYDLAALKYWGPTTYTNFPVVDYEKELKVMQGVSREEYLASIRRKSNGFSRGVSKYRGVARHHHNGRWEARIGRVFGNKYLYLGTYSTQEEAARAYDIAAIEYRGINAVTNFDLSSYIRWLKPNSTINTNTPAAELAILGGGGTPAALITPPPTMHVPRLLPPLVKGRGSSIADDVSAGSCVFGGPSPSPSPTTTALSLLLRSSVFQELVAQQQPPSTVDDDDDIGGHAAVSDAAQRAAEENEESFGEVLYGAGEGEAATAFSCSMYELGLDDNFARIEESLWGCL

SEQ ID NO: 37 - protein, 423 aa, Brachypodium sylvaticum
MEAYCSSLVKDELINGGGGGAGGMRYCEAAPRVSPPVAIKSVKRRKREPPAVSGMTTVSGGGGGNGKDGDKSAGNAAAAKRSSRFRGVSRHRWTGRFEAHLWDKGTWNPTQKKKGKQVYLGAYNEEEAAARAYDLAALKYWGPTTYTNFPVVDYEKELKVMQGVSREEYLASIRRKSNGFSRGVSKYRGVARHHHNGRWEARIGRVFGNKYLYLGTYSTQEEAARAYDIAAIEYRGINAVTNFDLSSYIRWLKPNSAANTNTPPAAAAELAILGGAPAALISPAPAPTTMRVPRLLPPLVRGRGGSIPDDVSAGGSCVFGSPSPSPSPTTTSALSLLLRSSVFQELVAQQQPPSIVDDDDGVGGQEAVSDAAERAAEENEESFGEVLYGAGEGEAAAAFSCSMYELGLDDSFARIEESLWGCL

SEQ ID NO: 38 - protein, 399 aa, Oryza sativa
METYGLVKDELLHGIGGGQGRLYCEVKPTAAPAVITAAGGGAKSVKRRKREPSAAAMSAVTVAGNGKEAGGSNAANKRSSRFRGVSRHRWTGRFEAHLWDKGTWNPTQKKKGKQVYLGAYNEEDAAARAYDLAALKYWGPTTYTNFPVADYEKELKLMQGVSKEEYLASIRRKSNGFSRGVSKYRGVARHHHNGRWEARIGRVFGNKYLYLGTYSTQEEAARAYDIAAIEYRGINAVTNFDLSTYIRWLKPPSSSSAAGTPHHHGGGMVVGADRVLAPAQSYPISAAADDDVAGCWRPLPSPSSSTTTALSLLLRSSMFQELVARQPVVEGDDGQLAVVSGDDADADADSDVKEPPPESEYGEVFASDEAAAAAAYGCSMYELDDSFALIDDSVWNCLI

SEQ ID NO: 39 - protein, 488 aa, Sorghum bicolor
METYSLQVKDELHGGGIGIGGGGQGLYCGATPRPAAPAATGGGGGGGDGAVKSNKRSRKREPPPPPPSSLVTMSNGGKDEAVAGSGDKSASSNSNASKRSSRFRGVSRHRWTGRFEAHLWDKGTWNPTQKKKGKQVYLGAYNEEDAAARAYDLAALKYWGPTTYTNFPVVDYERELKVMQNVSKEEYLASIRRKSNGFSRGVSKYRGVARHHHNGRWEARIGRVFGNKYLYLGTYSTQEEAARAYDIAAIEYRGINAVTNFDLSTYIRWLKPGGGVEDSAAGTPTSGVRAPGIPPASLSLQAGGLLQHPHGAAAGMLQVDVDDLYRGQLAAARGAALFSGGIDDVGSVYAAGSAGPSPTALCAGRPSPSPSPSSSTTALSLLLRSSVFQELVARNAGGGAAQQQQLVVADDDGAVSPADVVDAKVEQPEAEGELGRHGDQLYGAARADEDEDAFACSMYELDDSFARMEQSLWGCLRSSDAPDNMNNL

SEQ ID NO: 40 - protein, 443 aa, Sorghum bicolor
MESSGMMMVKSEIESCGYPGPSSSTAPAAGVVIGGSATTERGEGGHHHHHHQVVVRRRRREPPLLAPIAGGGIGKPLPSITVKRSSRFRGVSRHRWTGRFEAHLWDKNSWNPTQRKKGKQVYLGAYDEEEAAARAYDLAALKYWGPTTYTNFPVMDYEKELKIMENLTKEEYLASLRRKSSGFSRGVSKYRGVARHHQNGRWEARIGRVFGNKYLYLGTYSTQEEAARAYDIAAIEYKGVNAVTNFDLRSYITWLKPSGAPAAFNPEAALLMQAAPAEQLLHPAETAQMLPRVGNPFLLDHGAAPPGSSGGGGQDASMSSMVSPGAGGGMRRRGSSTALSLLLKSSMFRQLVEKNSDAEEGVRDREDAAAAAAAAHPAGPGDAYEYHNFFQGEAPPDMCDLFSSGGGGDHARNAGFHGEIAACYDDGEGLDGWNGFGNMSSLQ

SEQ ID NO: 41 - protein, 407 aa, Glycine max
MELAPVKSELSPRSHRLLMIDGSEVIGTKCVKRRRRDSSTAVLGGNGQQGEQLEEQKQLGGQSTATTVKRSSRFRGVSRHRWTGRFEAHLWDKGTWNPTQKKKGKQVYLGAYNDEEAAARAYDLAALKYWGISTFTNFPVSDYEKEIEIMKTVTKEEYLASLRRRSSGFSRGVSKYRGVARHHHNGRWEARIGRVFGNKYLYLGTYSTQEEAARAYDIAAIEYRGINAVTNFDLSTYIRWLRPGTHPTASHDQKPSTDAQPFATSNSMQARGNIEVSNSNKNSFPSGKLDSTKKRDFSKYMNPLSPCNKPSSPTALGLLLKSSVFRELMQRNLNSSSEEAEEVELKYPHEGNDGVGGIYDNENTNNSYFCSSNISRLPNLESSEESPLPMYHGTVQSLWNSAFNMSN

SEQ ID NO: 42 - protein, 406 aa, Glycine max
MELAPVKSELSPRSHRLVIIDGSDVISTKCAKRRRRDSSMAVLGGNGQQGEQLEEQKQLGGQSTATTVKRSSRFRGVSRHRWTGRFEAHLWDKGTWNPTQKKKGKQVYLGAYNDEEAAARAYDLAALKYWGTSTFTNFPVSDYEKEIEIMKTVTKEEYLASLRRRSSGFSRGVSKYRGVARHHHNGRWEARIGRVFGNKYLYLGTYSTQEEAARAYDIAAIEYRGINAVTNFDLSTYIRWLRPGTHPTASHDQKPSTDAQLFATSNSMQTRGNIEVSNSNMHSFPSGELDSTKKRDFSKYMNPLSPCNKPSSPTALGLLLKSSVFRELMQRNLNSSSEEADVELKYPQEGNDGVGGIYDNDNTSNSYFCSSNISRLPNLESSEECPLPMYHGTMQSLWNSAFNMSN

SEQ ID NO: 43 - protein, 418 aa, Populus trichocarpa
MEMTRNTGDQISLGRRRLCMIEEERRAGEAGKCIKRRRRDPSTFALSCNINDQQSDQQQQQQSLGDRTAAVATTVKRSSRFRGVSRHRWTGRFEAHLWDKGTWNPTQRKKGKQGAYDEEESAARAYDLAALKYWGTSTFTNFPASDYEKEIEIMKTVTKEEYLASLRRRSSGFSRGVSKYRGVARHHHNGRWEARIGRVFGNKYLYLGTYSTQEEAAHAYDIAAIEYRGINAVTNFDLSTYIRWLKPEASLPAPQTQESKPASDPLPMATFSNHLPSEKPTQLSVLQMDPSLMDNLNTPKNEDIFHRKTLPVSPLTRSSSSTALSLLFKSSIFKELVEKNLNTTSEEIEENDSKNPHNGNNNAGEAFYDGLSPIPHTGTSTEDPFLCSEQGETNTLPPYSGMEQSLWNGALSMPSRFH

SEQ ID NO: 44 - protein, 336 aa, Vitis vinifera
MEMTTVKSELGLERGRLCTAETDALEVTKCVKRRRRDPSAVTPGCSKQGEQQKQVLLQAGQSITAIATTMKRSSRFRGVSRHRWTGRFEAHLWDKGSWNVTQRKKGKQVYLGAYDEEESAARAYDLAALKYWGPSTFTNFPVSDYEKEIEIMQGLTKEEYLASLRRRSSGFSRGVSKYRGVARHHHNGRWEARIGRVFGNKYLYLGTYSTQEEAAHAYDIAAIEYRGINAVTNFELSTYVRWLRPRATALTPQEPRSNSIMQASSNCLPNEEVELSFLSPNPFTVDDLATPLKQEKFQREVSISPCTKSSSPTALSLLHRSSVFRQLVEKNSNSIE

SEQ ID NO: 45 - protein, 389 aa, Glycine max
MAMMKENIIEVSLGRRQMSMTEGEFQGTRSVKRRRREVAAAAGSGDDNHQQQLPQQEVGENTTVNTTKRSSRFRGVSRHRWTGRYEAHLWDKLSWNITQKKKGKQGAYDEEESAARAYDLAALKYWGTSTFTNFPISDYEKEIQIMQTMTKEEYLATLRRKSSGFSRGVSKYRGVARHHHNGRWEARIGRVFGNKYLYLGTYSTQEEAARAYDIAAIEYRGIHAVTNFDLSTYIKWLKPSGGGTLEANLESHAALEHQKVASPSNYALTEESKSLALHNSFFSPYSLDSPVKHERFGNKTYQFSSNKSSSPTALGLLLRSSLFRELVEKNSNVSGEEDDGEATKDQQTQIATDDDLGGIFFDSFSDIPFVCDPNRYDLELQERDLHSIF

SEQ ID NO: 46 - protein, 389 aa, Glycine max
MVMMKENIIEEKLGRSQMSMVEGEFQGTWGVKRRRREVAAAASSGDDNHHQQLPQQEVGENSSISTTKRSSRFRGVSRHRWTGRYEAHLWDKLSWNITQKKKGKQGAYDEEESAARAYDLAALKYWGNSTFTNFPISDYEKEIEIMQTMTKEEYLATLRRKSSGFSRGVSKYRGVARHHHNGRWEARIGRVFGNKYLYLGTYSTQEEAARAYDIAAIEYRGIHAVTNFDLSTYIKWLKPSGGGTPEENLESHAVLEHQKLASPSNYALTEESKSLVLPNSFISPDSLDSPVKHESFGNKTYQFSRNKSSSPTALGLLLRSSLFRELVEKNSNVSGEEADGEVTKDQQPQLASDDDLDGIFFDSFGDIPFVCDPTRYNLELQERDLHSIF

SEQ ID NO: 47 - protein, 392 aa, Medicago truncatula
MAMLIENEVMCLGKSQRSMDGKEVKGARRVKRQRRDAIVPKIGDDANKMAQKQVGENSTTNTSKRSSRFRGVSRHRWTGRFEAHLWDKLSWNTTQKKKGKQGAYDEEESAARAYDLAALKYWGTSTFTNFPISDYDKEIEIMNTMTKEEYLATLRRKSSGFSRGVSKYRGVARHHHNGRWEARIGRVFGNKYLYLGTYSTQEEAARAYDIAAIEYRGIHAVTNFELSSYIKWLKPETTTEENHESQILQKESRTLAPPNNSTLLQESKLLALQKSFFIPNDLNSTEKQESSFENKNYHFLSNKSTSPTALSLLLRSSLFRELLEKNSNVSEDEVTKEQQQQQITSDDELGGIFYDGIDNISFDFDPNSCNIELQERDLHSISCLYQYLNFGQ

SEQ ID NO: 48 - protein, 386 aa, Populus trichocarpa
MMMIKNEENPGRRRGCIADSEAQVARCVKRRRRDPAIVALGSDDNQSQQQMPQKQTDQTSAATTVKRSSRFRGVSRHRWTGRFEAHLWDKLSWNVTQKKKGKQGAYDEEESAARAYDLAALKYWGTSTFTNFPISDYEKEIEIMQTVTKEEYLASLRRKSSGFSRGVSKYRGVARHHHNGRWEARIGRVFGNKYLYLGTYSTQEEAARAYDIAAIEYRGINAVTNFDLSTYIRWIKPGVAAQAAANELQTVTDPQTAATLTDTYTPREETKPSLFLPNQFTADYLNSPPKLDAFQNNIFVDSSNKTSSPTALSLLLRSSVFRELVEKNSNVCEEETDGNEIKNQPMAGSDDEYGGIFYDGIGDIPFVYSSNKYSLGLEERELQFVL

SEQ ID NO: 49 - protein, 372 aa, Ricinus communis
MEMMMVKNEEISGRRRASVTESEAYVARCVKRRRRDAAVVTVGGDDSQSHQQQQQQQPEQQAHQISAATTVKRSSRYRGVSRHRWTGRFEAHLWDKLSWNVTQKKKGKQGAYDEEESAARAYDLAALKYWGTSTFTNFPISDYEKEIEIMQTVTKEEYLASLRRKSSGFSRGVSKYRGVARHHHNGRWEARIGRVFGNKYLYLGTYSTQEEAARAYDIAAIEYRGINAVTNFDLSTYIRWLKPEVAAQVAANEPQTVAESRMLPSINNRIAREESKPSFFSATPFSLDCWSYPRKQEEFQNRTPITPCSKTSSPTALSLLLRSSIFRELVEKNSNVSEDENEGEETKNQSQIGSDDEFGGLFYERIGDIPFI

SEQ ID NO: 50 - protein, 404 aa, Vitis vinifera
MEMMRVKSEENLGRRRMCVADAEAQGTRCVKRRRRDPAIVTLGCDDQSQQQQLPNQQPDQASAATTVKRSSRFRGVSRHRWTGRFEAHLWDKFSWNVTQKKKGKQGAYDEEESAARAYDLAALKYWGASTFTNFPVSDYEKEIEIMQSVTKEEYLACLRRKSSGFSRGVSKYRGVARHHHNGRWEARIGRVFGNKYLYLGTYSTQEEAARAYDIAAIEYRGINAVTNFDLSTYIRWLNPAANNPVVPHESRANTEPQALASSNFVLSEESEPLFFHSNSFTMDDLNPPHKQEVFQTKIPIEPCSKSSSPTALGLLLRSSIFRELVEKNSNAPEDETDAEDTKNQQQVGSDDEYGIFYDGIGDIPFVCPSNGDRNELQERLPLPFTISQGNPYGTAVLTSMQSIN

SEQ ID NO: 51 - protein, 378 aa, Brachypodium distachyon
MAKQRTDSAGTDAAAVQLTKPKRTRKSVPRRESPSRRTSAYRGVTRHRWTGRFEAHLWDKNTWTQSQRKKKGRQVYLGAYGGEEAAARAYDLAALKYWGRDTVLNFPLSNYDEEWKEMEGQSREEYIGSLRRKSTGFSRGVSKYRGVARHHHNGKWEARIGRVYGNKYLYLGTYGTQEEAAMAYDIAAIEHRGLNAVTNFDVSRYIDWHRRLCRDLGDNIITPLTNPTVDLEEAMAGDDDDGQFLLPSQATTPPSTSSALGLLLLSPRLKEVIEGSGAASAMAASTSESSAAGSPPPSWSSSSCSPSPPSPSHSPPETQQKQQQQEYGASAAAARCSFPDDVQTYFGCEDGCAEVDTFLFGDLSAYAAPMFQFELLDV

SEQ ID NO: 52 - protein, 416 aa, Oryza sativa
MAKRRSNGETAAASSDDSSSGVCGGGGGGEVEPRRRQKRPRRSAPRDCPSQRSSAFRGVTRHRWTGRFEAHLWDKNTWNESQSKKGRQGAYDGEEAAARAYDLAALKYWGHDTVLNFPLSTYDEELKEMEGQSREEYIGSLRRKSSGFSRGVSKYRGVARHHHNGKWEARIGRVFGNKYLYLGTYATQEEAAVAYDIAAIEHRGLNAVTNFDINLYIRWYHGSCRSSSAAAATTIEDDDFAEAIAAALQGVDEQPSSSPATTRQLQTADDDDDDLVAQLPPQLRPLARAASTSPIGLLLRSPKFKEIIEQAAAAAASSSGSSSSSSTDSPSSSSSSSLSPSPLPSPPPQQQPTVPKDDQYNVDMSSVAAARCSFPDDVQTYFGLDDDGFGYPEVDTFLFGDLGAYAAPMFQFELDV

SEQ ID NO: 53 - protein, 440 aa, Sorghum bicolor
MARPRKNAGTDEDNPNAATGVSVTGKPPKLKRVRRKGEPRESSTPSQRSSAYRGVTRHRWTGRFEAHLWDKDARNGSRNKKGKQGAYDDEEAAARAHDLAALKYWGPATVLNFPLCGYDEELREMEAQPREEYIGSLRRRSSGFSRGVSKYRGVARHHHNGRWEARIGRVLGNKYLYLGTFATQEEAAVAYDIAAIEHRGLNAVTNFDISHYVNHWHRHCHGPSDDSLGVVVDDVAAFQLPDDLPECPAAAIGVEETTGGDAEFHNGEEGYLQHHTSGPFGAQQQLPDETGALAAHQMAPNSSALDMVLQSPKFKELMEQVSAAAAAVASESSIGGSMSSSSPSPSLSSFSPSPLQLPSPSSLSSFSPSSPLQQPSPPLQQPEFVEGAPAARCSFPDDVQTFFDFENESDMSFMYAEVDTFLFGDLGAYAAPIFHFDLDV

SEQ ID NO: 54 - protein, 408 aa, Zea mays
MARPRKNGGTDEDDANAATGATGKPKKLMKRARRKSESPSPRSSAYRGVTRHRWTGRFEAHLWDKDARNGSRSKKGKQVYLGAYDDEDAAARAHDLAALKYWGPAGTVLNFPLSGYDEERREMEGQPREEYVASLRRRSSGFARGVSKYRGVARHHHNGRWEARIGRVLGNKYLYLGTYATQEEAAVAYDMAAIEHRGFNAVTNFDISHYINHWHRHCHGPCDGSLGAMDVAPNVSLELDLLECPATVGLGLEETTGDDEFHNREDYLGHLFGVQQLPDEMGPPAHQMAPASSALDLVLQSPRFKELMQQVSAAGASETNGGSMRSSPSTSLCSFSPSPLELPSPPLQQPTEFIDGAPPRCSFPDDVQSFFDFKNDNDMSFVYAEVDTFLFGDLGAYAPPMFDFDLYE

SEQ ID NO: 55 - protein, 304 aa, Arabidopsis lyrata
MAKVSRRSKKTIVEDEISDKTASASEAASIVFKSKRKRKSPPRNAPPQRSSPYRGVTRHRWTGRYEAHLWDKNSWNETQTKKGRQVYIGAYDEEEAAARAYDLAALKYWGRDTLLNFPLLIYDEDVKEMEGQSKEEYIGSLRRKSSGFSRGVSKYRGVARHHHNGRWEARIGRVFGNKYLYLGTYATQEEAAIAYDIAAIEYRGLNAVTNFDVSRYLNPDAADSKPIRNDPESSDDNKCPKSEEIIEPSTSPEAITTRRSFPDDIQTYFGCQDSGKLATEEDVIFGGLNSFINPGFYNEFDYGP

SEQ ID NO: 56 - protein, 308 aa, Arabidopsis thaliana
MAKVSGRSKKTIVDDEISDKTASASESASIALTSKRKRKSPPRNAPLQRSSPYRGVTRWTGRYEAHLWDKNSWNDTQTKKGRQGAYDEEEAAARAYDLAALKYWGRDTLLNFPLPSYDEDVKEMEGQSKEEYIGSLRRKSSGFSRGVSKYRGVARHHHNGRWEARIGRVFGNKYLYLGTYATQEEAAIAYDIAAIEYRGLNAVTNFDVSRYLNPNAAADKADSDSKPIRSPSREPESSDDNKSPKSEEVIEPSTSPEVIPTRRSFPDDIQTYFGCQDSGKLATEEDVIFDCFNSYINPGFYNEFDYGP

SEQ ID NO: 57 - protein, 303 aa, Arabidopsis thaliana
MAKVSGRSKKTIVDDEISDKTASASESASIALTSKRKRKSPPRNAPLQRSSPYRGVTRHRWTGRYEAHLWDKNSWNDTQTKKGRQVYLGAYDEEEAAARAYDLAALKYWGRDTLLNFPLPSYDEDVKEMEGQSKEEYIGSLRRKSSGFSRGVSKYRGVARHHHNGRWEARIGRVFATQEEAAIAYDIAAIEYRGLNAVTNFDVSRYLNPNAAADKADSDSKPIRSPSREPESSDDNKSPKSEEVIEPSTSPEVIPTRRSFPDDIQTYFGCQDSGKLATEEDVIFDCFNSYINPGFYNEFDYGP

SEQ ID NO: 58 - protein, 332 aa, Arabidopsis lyrata
MEEITRKSKKTSVENETGDDQSATSVVVKAKRKRRSQPRDAPPQRSSVHRGVTRHRWTGRYEAHLWDKNSWNETQSKKGRQGAYDEEDAAARAYDLAALKYWGRDTILNFPLCNYEEDIKEMESQSKEEYIGSLRRKSSGFSRGVSKYRGVAKHHHNGRWEARIGRVFGNKYLYLGTYATQEEAAIAYDIAAIEYRGLNAVTNFDISRYMKLPVPENPIDAANNLLESPHSDSSPFINPTHESDLSQSQSSSDDNDDRKTKLLKSSPLNAEEVIGPSTPPEIAPPRRSFPEDIQTYFGCQNSGKLTTEEDDVIFGDLDSFLTPDFYSELNDC

SEQ ID NO: 59 - protein, 328 aa, Thellungiella halophila
MAKVSQRSKKTIVNDEISDKKAVAVASVSSSAFLKSKRKRKLPPQNAPPQRSSSYRGVTRHRWTGRYEAHLWDKNCWNETQTKKGRQVYLGAYDEEEAAARAYDLAALKYWGRDTLLNFPLPTYEEDVKEMEGHSREEYIGSLRRKSSGFSRGVSKYRGVARHHHNGRWEARIGRVFGNKYLYLGTYATQEEAARAYDIAAIEYRGLNAVTNFDVSRYLNLPESKNPSAAANHLPDESDYYDSMPVRNPNHEPRSPDGQTSSEDNDYTKTEETLDPEAIPSRRSFPDDIQTYFGCQDSGKLATEEDVIFGGFNSFINPGFYNDFDYAP

SEQ ID NO: 60 - protein, 345 aa, Arabidopsis thaliana
MFIAVEVSPVMEDITRQSKKTSVENETGDDQSATSVVLKAKRKRRSQPRDAPPQRSSVHRGVTRHRWTGRYEAHLWDKNSWNETQTKKGRQVYLGAYDEEDAAARAYDLAALKYWGRDTILNFPLCNYEEDIKEMESQSKEEYIGSLRRKSSGFSRGVSKYRGVAKHHHNGRWEARIGRVFGNKYLYLGTYATQEEAAIAYDIAAIEYRGLNAVTNFDISRYLKLPVPENPIDTANNLLESPHSDLSPFIKPNHESDLSQSQSSSEDNDDRKTKLLKSSPLVAEEVIGPSTPPEIAPPRRSFPEDIQTYFGCQNSGKLTAEEDDVIFGDLDSFLTPDFYSELNDC

SEQ ID NO: 61 - protein, 299 aa, Glycine max
MAKKSQKSLKNNNNNNTTRKRTRKSVPRDSPPQRSSIYRGVTRHRWTGRYEAHLWDKNCWNESQSKKGRQVYLGAYDDEEAAARAYDLAALKYWGQDTILNFPLSNYEEKLKEMEGQSKEEYIGSLRRKSSGFSRGVSKYRGVARHHHNGRWEARIGRVFGNKYLYLGTYATQEEAAAAYDMAAIEYRGLNAVTNFDLSRYINWPRPKTEENHQNTPSNQNVNSNAELELGSASDEITEEGVARSSESESNPSRRTFPEDIQTIFENNQDSGIYIENDDIIFGDLGSFGAPIFHFELDV

SEQ ID NO: 62 - protein, 393 aa, Brachypodium distachyon
MAKPRKNSAAANNNNNDNSTNANNAVAEAAAADVRAKPKKRTRKSVPRESPSQRSSIYRGVTRHRWTGRFEAHLWDKNSWNESQNKKGKQVYLGAYDEEEAAARAYDLAALKYWGPDTILNFPLSVYDDELKEMEGQSREEYIGSLRRKSSGFSRGVSKYRGVARHHHNGRWEARIGRVFGNKYLYLGTYATQEEAAMAYDMAAIEYRGLNAVTNFDLSRYIKWLRPGGGVDSAAAAAARNPHPMLAGLATQEELPAIDHLLDGMAFQQHGLHSSSAAAAAAQEFPLPPALGHAPTTSALSLLLQSPKFKEMIERTSAAETTTTATTTSSSSSPRPAASPQCSFPEDIQTFFGCDDGVGVGVGAVGYTDVDGLFFGDLSAYASSTAFHFELDL

SEQ ID NO: 63 - protein, 379 aa, Oryza sativa
MAKPRKNSTTTNTSSSGVAAAAAAAAVKPKRTRKSVPRESPSQRSSVYRGVTRHRWTGRFEAHLWDKNSWNESQNKKGKQVYLGAYDDEEAAARAYDLAALKYWGPDTILNFPLSAYEGELKEMEGQSREEYIGSLRRKSSGFSRGVSKYRGVARHHHNGRWEARIGRVFGNKYLYLGTYATQEEAAMAYDMAAIEYRGLNAVTNFDLSRYIKWLRPGADGAGAAQNPHPMLGALSAQDLPAIDLDAMASSFQHDGHGAAAAAAQLIPARHSLGHTPTTSALSLLLQSPKFKEMIERTSAAETTTTSSTTTSSSSPSPPQATKDDGASPQCSFPKDIQTYFGCAAEDGAAGAGYADVDGLFFGDLTAYASPAFHFELDL

SEQ ID NO: 64 - protein, 398 aa, Sorghum bicolor
MAKPRKNSAAANNNNSSSNGAGDLTPRAKPKRTRKSVPRESPTQRSSVYRGVTRHRWTGRFEAHLWDKNSWNESQNKKGKQVYLGAYDDEEAAARAYDLAALKYWGPDTILNFPASAYEGEMKGMEGQSREEYIGSLRRKSSGFSRGVSKYRGVARHHHNGRWEARIGRVFGNKYLYLGTYATQEEAAMAYDMAAIEYRGLNAVTNFDLSRYIKWLRPGAGGMAAAAAAAQNPHPMLGGLAQQLLLPPPADTTTTDGAGAAAFQHDHHGAEAFPLPPRTSLGHTPTTSALSLLLQSPKFKEMIQRTESGTTTTTTTTSSLSSSPPPTPSPSPPRRSPAPTQPPVQAAARDASPHQRGFPEDVQTFFGCEDTAGIDVEALFFGDLAAYATPAFHFEMDL

SEQ ID NO: 65 - protein, 396 aa, Zea mays
MARPRKNSAAAANNNNSNTTNAGNAAVDLAARVKPKRTRKSVPRESPSQRSSVYRGVTRHRWTGRFEAHLWDKNSWNESQNKKGKQVYLGAYDDEDAAARAYDLAALKYWGPDTILNFPASAYEAELKEMEGQSREEYIGSLRRKSSGFSRGVSKYRGVARHHHNGRWEARIGRVFGNKYLYLGTYGTQEEAAMAYDMAAIEYRGLNAVTNFDLSRYIKWLRPGAGAAQNPHPMLDGLAQQLLLSPEGTIDGAAFHQQQHDHRQQGAAELPLPPRASLGHTPTTSALGLLLQSSKFKEMIQRASAAESGTTTVTTTSSSSSQPPTPTPTPSPSPPPTPPVQPARDASPQCSFPEDIQTFFGCEDVAGVGAGVDVDALFFGDLAAYASPAFHFEMDL

SEQ ID NO: 66 - protein, 362 aa, Glycine max
MAKKSQLRTQKNNATNDDINLNATNTVITKVKRTRRSVPRDSPPQRSSIYRGVTRHRWTGRYEAHLWDKHCWNESQNKKGRQGAYDNEEAAAHAYDLAALKYWGQDTILNFPLSNYLNELKEMEGQSREEYIGSLRRKSSGFSRGISKYRGVARHHHNGRWEARIGKVFGNKYLYLGTYATQEEAATAYDLAAIEYRGLNAVTNFDLSRYIKWLKPNNTNSNNDQISINLTNINNNCTNNFIPNPDQEQEVSFFHNQDSLNNTIVEEATLVPHQPRPASATLALELLLQSSKFKEMVEMTSVANLSTQMESDQLPQCTFPDHIQTYFEYEDSNKYEEGDDLLFKFSEFSSIVPFYHCDEFES

SEQ ID NO: 67 - protein, 370 aa, Glycine max
MAKKSQLRTQKNNVTTNDDNNLNVTNTVTTKVKRTRRSVPRDSPPQRSSIYRGVTRHRWTGRYEAHLWDKHCWNESQNKKGRQVYLGAYDNEEAAAHAYDLAALKYWGQDTILNFPLSNYLNELKEMEGQSREEYIGSLRRKSSGFSRGISKYRGVARHHHNGRWEARIGKVFGNKYLYLGTYATQEEAATAYDLAAIEYRGLNAVTNFDLSRYIKWLKPNNNTNNVIDDQISINLTNINNNNNCTNSFTPSPDQEQEASFFHNKDSLNNTIVEEVTLVPHQPRPASATSALELLLQSSKFKEMMEMTSVANLSSTQMESELPQCTFPDHIQTYFEYEDSNRYEEGDDLMFKFNEFSSIVPFYQCDEFES

SEQ ID NO: 68 - protein, 356 aa, Medicago truncatula
MAKKSQKQIEKDDNASNDNDNLNPSNTVTTKAKRTRKSVPRTSPPQRSSIYRGVTRHRWTGRYEAHLWDKNCWNESQNKKGRQGAYDNEETAAHAYDLAALKYWGQDTIINFPLSNYQKELIEMESQSREEYIGSLRRKSSGFSRGVSKYRGVARHHHNGRWEARIGKVFGNKYLYLGTYATQEEAATAYDMAAIEYRGLNAVTNFDLSRYIKWLKPNNNNNDDNNKSNINLCDINSNSSANDSNSNEELEFSLVDNEISLNNSIDEATLVQPRPTSATSALELLLQSSKFKEMVEMASMTSNVSTTLESDQLSQCAFPDDIQTYFEYENFNDTMLEDLNSIMPTFHYDFEGAEVL

SEQ ID NO: 69 - protein, 347 aa, Glycine max
MAKQQTHKINASTNNNISTTNTVTAKVKRTRRSVPRDSPPQRSSIYRGVTRHRWTGRYEAHLWDKNCWNESQNKKGRQGAYDDEEAAAHAYDLAALKYWGQDTILNFPLSTYQNELKEMEGQSREEYIGSLRRKSSGFSRGVSKYRGVARHHHNGRWEARIGRVFGNKYLYLGTYATQEEAATAYDMAAIEYRGVNAVTNFDLSRYIKWLKPNNNNTTVNSNLIDSNPNCETNFTSNSNQQQGFNFFNRQESFNNEEAAMTQPRPAVATSALGLLLQSSKFKEMMEMTSATDLSTPPSESELPSCTFPDDIQTYFECEDSHRYGEGDDIMFSVLNGFVPPMFHCDDF

SEQ ID NO: 70 - protein, 351 aa, Glycine max
MAKQQTHEINASTNNNINTTKTVTTKVKRTRRSVPRNSPPQRSSIYRGVTRHRWTGRYEAHLWDKNCWNESQNKKGRQGAYDDEEAAAHAYDLAALKYWGQDTILNFPLSTYQNELKEMEGQSREEYIGSLRRKSSGFSRGVSKYRGVARHHHNGRWEARIGRVFGNKYLYLGTYATQEEAATAYDMAAIEYRGLNAVTNFDLSRYIKWLKPNNNNNKVNSNNLIVSIPNCATNFTPNSNQQQGFNFFNSQESFNNNEEAAMTQPRPAAATSALGLLLQSSKFKEMMEMTSAIDLSTPPSESELPPCTFPDDIQTYFECEDSHRYGEGDDIMFSELNGFVPPMFHCDDFEA

SEQ ID NO: 71 - protein, 353 aa, Populus trichocarpa
MAKLSQKNTKNTASNNNNTTNGVTKVKRTRRSVPRDSPPQRSSIYRGVTRHRWTGRYEAHLWDKNCWNESQNKKGRQGAYDDEEAAAHAYDLAALKYWGPETILNFPLSTYQNELKEMEGQSREECIGSLRRKSSGFSRGVSKYRGVARHHHNGRWEARIGRVFGNKYLYLGTYATQEEAATAYDMAAIEYRGLNAVTNFDLSRYIKWLKPNQNNTDNNNGLDLPNPIIGTDNSTHPNPNQELGTTFLQINQQTYQPSETTLTQPRPATNPSSALGLLLQSSKFKEMMEMTAVTDCPPTPPSGLDPTPCSFLEDVQTYFDCLDSSNYGDQGDDMIFGDLNSFVPPMFQCDFET

SEQ ID NO: 72 - protein, 323 aa, Vitis vinifera
MAKLSQQNHKNSANSNATNTTLSVTKVKRTRKTVPRDSPPQRSSIYRGVTRHRWTGRYEAHLWDKNCWNESQNKKGRQVYLGAYHDEEAAAHAYDLAALKYWGPETILNFPLSTYEKELKEMEGLSREEYIGSLRRRSSGFSRGVSKYRGVARHHHNGRWEARIGRVFGNKYLYLGTYATQEEAATAYDMAAIEYRGLNAVTNFDLSRYIKWLKPNQNNPCEQPNNPNLDSNLTPNPNHDFGISFLNHPQTSGTAACKMMEMTTAADHLSTPPESELPRCSFPDDIQTYFECQDSGSYEEGDDVIFSELNSFIPPMFQCDFSA

SEQ ID NO: 73 - protein, 347 aa, Vitis vinifera
MAKLSQQNHKNSANSNATNTTLSVTKVKRTRKTVPRDSPPQRSSIYRGVTRHRWTGRYEAHLWDKNCWNESQNKKGRQGAYHDEEAAAHAYDLAALKYWGPETILNFPLSTYEKELKEMEGLSREEYIGSLRRRSSGFSRGVSKYRGVARHHHNGRWEARIGRVFGNKYLYLGTYATQEEAATAYDMAAIEYRGLNAVTNFDLSRYIKWLKPNQNNPCEQPNNPNLDSNLTPNPNHDFGISFLNHPQTSGTAACSEPPLTQTRPPIASSALGLLLQSSKFKEMMEMTTAADHLSTPPESELPRCSFPDDIQTYFECQDSGSYEEGDDVIFSELNSFIPPMFQCDFSA

SEQ ID NO: 74 - protein, 275 aa, Populus trichocarpa
MGKTSKQSLKNSANTSINPATKVKRTRKSVPRDSPPQRSSIYRGVTRHRWTGRYEAHLWDKNCWNESQNKKGRQGAYDDEEAAGHAYDLAALKYWGQDTILNFPLSTYEEEFKEMEGHSKEEYIGSLRRKSSGFSRGVSKYRGVARHHHNGRWEARIGRVFGNKYLYLGTYATQEEAATAYDMAAIEYRGLNAVTNFDLSRYSSKFKEMLERTSASDCPLTPPESDRDPPRRSFPDDIQTYFDCQDSSSYTDGDDIIFGDLHSFASPIFHCELDG

SEQ ID NO: 75 - protein, 304 aa, Vitis vinifera
MAKTSQKSQKTTGNSTNNNGGSVAKVKRTRKSVPRDSPPQRSSIFRGVTRHRWTGRYEAHLWDKNCWNESQNKKGRQVYLGAYDDEEAAAHAYDLAALKYWGQETILNFPLSAYQEELKEMEGQSKEEYIGSLRRKSSGFSRGVSKYRGVARHHHNGRWEARIGRVFGNKYLYLGTYATQEEAATAYDMAAIEYRGLNAVTNFDLSRYINSPAPNPNPSDHELGLSFLQQQHGSDATELPLSHARSDCPLTPPDQIEMPRSSFPDDIQTYFDCQETNSYGESDDIIFGDLKYFSSPMFQCELDT

SEQ ID NO: 76 - protein, 393 aa, Sorghum bicolor
MASPNPEAAAGLQTVAVAAGGGEGGSSSSLGAVAGAAAVSSSGELVPRRSLAVRKERVCTAKERISRMPPCAAGKRSSIYRGVTRHRWTGRYEAHLWDKSTWNQNQNKKGKQGAYDDEEAAARAYDLAALKYWGAGTQINFPVSDYARDLEEMQMISKEDYLVSLRRQLHNSRWDTSLGLGNDYMSLSCGKDIMLDGKFAGSFGLERKIDLTNYIRWWLPKKTRQSDTSKTEEIADEIRAIESSMQQTEPYKLPSLGLGSPSKPSSVGLSACSILSQSDAFKSFLEKSTKLSEECTLSKEIVEGKTVASVPATGYDTGAININMNELLVQRSTYSMAPVMPTPMKTTWSPADPSVDPLFWSNFVLPSSQPVTMATITTTTNEVSSSDPFQSQE

SEQ ID NO: 77 - protein, 428 aa, Lupinus angustifolius
MASSSSDPGKSEIGGGAAETSEAAAVAVAVTNDQSLLYRGLKKAKKERGCTAKERISKMPPCAAGKRSSIYRGVTRHRWTGRYEAHLRDKSTWNQNQNKKGKQVYLGAYDDEEAAARAYDLAALKYWGPGTLINFPVTDYTRDLEEMQNVSREEYLASLRRKSSGFSRGISKYRALSSRWEPSYSRFAGSDYFNSMHYGAGDDSAAESEYASGFCIERKIDLTGHIKWWGSNKSRQPDAGTRLSEEKRHGFAGDICSEPKTLEQKVQPTEPYQMPELGRSHNEKKHRSSAVSALSILSQSAAYKSLQEKASKKQENSTDNDENENKNTVNKLDHGKAVEKSSNHDGGSDRVDIEIGTTGALSLQRNIYPLTPFLSAPLLTAYNTVDPSLVDPVLWTSLVPMLSAGLSCPTQVTKTETSSSYTIFQPEG

SEQ ID NO: 78 - protein, 440 aa, Ricinus communis
MASSSSDPGLKPELGGGSGGESSEAVIANDQLLLYRQLKKPKKERGCTAKERISKMPPCTAGKRSSIYRGVTRHRWTGRYEAHLWDKSTWNQNQNKKGKQGAYDDEEAAARAYDLAALKYWGPGTLINFPVTDYSRDLEEMQNVSREEYLASLRRKSSGFSRGISKYRGLSSQWDSSFGRMPGSEYFSSINYGAADDPAAESEYVGSLCFERKIDLTSYIRWWGFNKTRESVSKSSDERKHGYGEDISELKSSEWAVQSTEPYQMPRLGMPDNGKKHKCSKISALSILSHSAAYKNLQEKASKKQENCTDNDEKENKKTNKMDYGKAVEKSTSHDGSNERLGAALGMSGGLSLQRNAYQLAPFLSAPLLTNYNAIDPLVDPILWTSLVPVLPAGFSRNSEVGMGLQIVSCHKDRDKFNLYLLSAGGVSTFLLLVVHWRFC

SEQ ID NO: 79 - protein, 428 aa, Lupinus angustifolius; identical to SEQ ID NO: 77

SEQ ID NO: 80 - protein, 508 aa, Aspergillus fumigatus
MKMSASKTVTSSASAVSTSSGRSTPSKLVNGATRNGSAAAGNGSTGTAKGKRRSKYRHVAAYHSELRHSSLSRETSVVPSFLGFRNLMVIVLVAMNLRLIIENFMKYGVLICIKCHDYRKQDVVLGSILFALVPCHLFLAYIIELVAAQQSKKTVGRQKKDLSTEEREREQQAFRSTWRYTAFFHTVNATLCLAVTSFVVYFYINHPGIGTICELHAIIVWLKNCSYAFTNRDLRQAMVDPSAESALPEIYSTCPYPRNITLGNLTYFWLAPTLVYQPVYPRSSHIRWSFVAKRLAEFFGLAVFIWLLSAQYAAPVLRNSIDKIAVMDIASILERVMKLSTISLVIWLAGFFALFQSLLNALAEVMRFGDREFYTDWWNSPSLGAYWRSWNRPVYLFMKRHVFSPLVGRGWSPFAASFMVFSLSAVLHEMLVGIPTHNLIGVAFAGMMFQLPLIAVTAPFEKVNDALGKIVGNSIFWVSFCLVGQPLGALLYFFAWQAKYGSVSKIHV

SEQ ID NO: 81 - protein, 521 aa, Ricinus communis
MTILETPETLGVISSSATSDLNLSLRRRRTSNDSDGALADLASKFDDDDDVRSEDSAENIIEDPVAAVTELATAKSNGKDCVANSNKDKIDSHGGSSDFKLAYRPSVPAHRSLKESPLSSDLIFKQSHAGLFNLCIVVLVAVNSRLIIENLMKYGWLIKTGFWFSSRSLRDWPLFMCCLSLPVFPLAAYLVEKAAYRKYISPPIVIFLHVIITSAAVLYPASVILSCESAFLSGVTLMELACMVWLKLVSYAHTNYDMRAIADTIHKEDASNSSSTEYCHDVSFKTLAYFMVAPTLCYQPSYPRTAFIRKGWVFRQFVKLIIFTGFMGFIIEQYINPIVQNSQHPLKGDLLYAIERVLKLSVPNLYVWLCLFYCFFHLWLNIVAELLRFGDREFYKDWWNAKTVEEYWRMWNMPVHKWMVRHIYFPCLRRKIPRGVAIVIAFFVSAVFHELCIAVPCHMFKLWAFFGIMFQIPLVVITNYFQRKFRSSMVGNMIFWFFFCILGQPMCVLLYYHDLMNRDGN

SEQ ID NO: 82 - protein, 526 aa, Vernicia fordii
MTIPETPDNSTDATTSGGAESSSDLNLSLRRRRTASNSDGAVAELASKIDELESDAGGGQVIKDPGAEMDSGTLKSNGKDCGTVKDRIENRENRGGSDVKFTYRPSVPAHRALKESPLSSDNIFKQSHAGLFNLCIVVLVAVNSRLIIENIMKYGWLIKTGFWFSSRSLRDWPLLMCCLTLPIFSLAAYLVEKLACRKYISAPTVVFLHILFSSTAVLYPVSVILSCESAVLSGVALMLFACIVWLKLVSYAHTNFDMRAIANSVDKGDALSNASSAESSHDVSFKSLVYFMVAPTLCYQPSYPRTASIRKGWVVRQFVKLIIFTGFMGFIIEQYINPIVQNSQHPLKGDLLYAIERVLKLSVPNLYVWLCMFYCFFHLWLNILAELLRFGDREFYKDWWNARTVEEYWRMWNMPVHKWMVRHIYFPCLRHKIPRGVALLITFFVSAVFHELCIAVPCHIFKLWAFIGIMFQIPLVGITNYLQNKFRSSMVGNMIFWFIFCILGQPMCLLLYYHDLMNRKGTTESR

SEQ ID NO: 83 - protein, 523 aa, Vernonia galamensis
MALLDTPQIGEITTTATTTIRRRTTVKPDAGIGDGLFDSSSSSKTNSSFEDGDSLNGDFNDKFKEQIGAGDESKDDSKGNGQKIDHGGVKKGRETTVVHYAYRPSSPAHRRIKESPLSSDAIFKQSHAGLFNLCIVVLVAVNGRLIIENLMKYGLLINSNFWFSSRSLRDWPLLMCCLTPSDFPLAAYIVEKLAWKKRISDPVVITLHVIITTTAILYPVFMILRFDSVVLSGVSLMLCACINWLKLVSFVHTNYDMRSLLNSTDKGEVEPMSSNMDYFYDVNFKSLVYFMVAPTLCYQISYPRTAFIRKGWVLRQLIKLVIFTGFMGFIIEQYINPIVKNSRHPLKGDFLYAIERVLKLSVPNLYVWLCMFYCFFHLWLNILAELLCFGDREFYKDWWNAQTIEEYWRLWNMPVHKWIVRHLYFPCLRNGIPKGAAILVAFFMSAVFHELCIAVPCHIFKFWAFIGIMFQVPLVLLTNYLQHKFQNSMVGNMIFWCFFSIFGQPMCVLLYYHDVMNQKGKSK

SEQ ID NO: 84 - protein, 517 aa, Vernonia galamensis
MALLDTPQIGEITTTATTTIRQHPLGKPDAGIGDGLFSSSSSKTNSSFEDGDSLNGDFNDKFKEQIGAGDESKKGNGKIDHGGVKKGRETTVVHYAYRPSSPAHRRIKESPLSSDAIFKQSHAGLFNLCIVVLVAVNGRLIIENLMKYGLLINSKFWFSSRSLRDWPLLMCWLTPSDFPLAAYIVEKLAWKKRISDPVVITLHVVITTTAILYPIFMILRFDSVVLLGVSLMLCACINWLKLVSFVHTNYDMRSLLNSTGKGEVEPMSSNMDYFYDINFKSLVYFMVAPTLCYQISYPRTAFIRKGWVFRQLIKLVIFTGFMGFIIEQYINPIVKNSRHPLNGDFLYAIERVLKVSVPNLYVWLCMFYCFFHLWLNILAELLWFGDREFYKDWWNTQTIEEYWRLWNMPVHKWIVRHLYFPCLRNGISKGAAILVAFFMSAVFHELCIAVPCHILKFWAFIGIMFQVPLVLLTNYLQHKFQNSMVGNMIFWCFFSIFGQPMCVFLYYHEVNQKGKSK

SEQ ID NO: 85 - protein, 507 aa, Euonymus alatus
MAANLNEASDLNFSLRRRTGGISSTTVPDSSSETSSSEADYLDGGKGAADVKDRGDGAVEFQNSMKNVERIEKHESRVGLDSRFTYRPSVPAHRTIKESPLSSDAIFKQSHAGLFNLCIVVLVAVNSRLIIENLMKYGWLIRSGFWFSSRSLRDWPLFMCCLTLPVFPLAAFLFEKLAQKNLISEPVVVLLHIVNTTAAVLYPVLVILRCDSAFMSGVTLMLFACIVWLKLVSYAHTNYDMRALTKSVEKGDTPLSSQNMDYSFDVNIKSLAYFMVAPTLCYQISYPRTPYVRKGWVVRQFVKLIIFTGLMGFIIEQYINPIVQNSQHPLKGNFLYAIERVLKLSVPNLYVWLCMFYCLFHLWLNILAELLCFGDREFYKDWWNAKTVEEYWRMWNMPVHKWMVRHIYFPCLRNGIPKGVAFVISFLVSAVFHELCIAVPCHIFKLWAFFGIMLQVPLVLITSYLQNKFRSSMVGNMMFWFSFCIFGQPMCLLLYYHDLMNRNGKME

SEQ ID NO: 86 - protein, 498 aa, Caenorhabditis elegans
MQMRQQTGRRRRQPSETSNGSLASSRRSSFAQNGNSSRKSSEMRGPCEKVVHTAQDSLFSTSSGWTNFRGFFNLSILLLVLSNGRVALENVIKYGILITPLQWISTFVEHHYSIWSWPNLALILCSNIQILSVFGMEKILERGWLGNGFAAVFYTSLVIAHLTIPVVVTLTHKWKNPLWSVVMMGVYVIEALKFISYGHVNYWARDARRKITELKTQVTDLAKKTCDPKQFWDLKDELSMHQMAAQYPANLTLSNIYYFMAAPTLCYEFKFPRLLRIRKHFLIKRTVELIFLSFLIAALVQQWVVPTVRNSMKPLSEMEYSRCLERLLKLAIPNHLIWLLFFYTFFHSFLNLIAELLRFADREFYRDFWNAETIGYFWKSWNIPVHRFAVRHIYSPMMRNNFSKMSAFFVVFFVSAFFHEYLVSVPLKIFRLWSYYGMMGQIPLSIITDKVVRGGRTGNIIVWLSLIVGQPLAILMYGHDWYILNFGVSAVQNQTVGI

SEQ ID NO: 87 - protein, 498 aa, Rattus norvegicus
MGDRGGAGSSRRRRTGSRVSVQGGSGPKVEEDEVREAAVSPDLGAGGDAPAPAPAPAHTRDKDRQTSVGDGHWELRCHRLQDSLFSSDSGFSNYRGILNWCVVMLILSNARLSLENLIKYGILVDPIQVVSLFLKDPYSWPAPCLIIASNIFIVATFQIEKRLSVGALTEQMGLLLHVVNLATIICFPAAVALLVESITPVGSLFALASYSIIFLKLSSYRDVNLWCRQRRVKAKAVSAGKKVSGAAAQNTVSYPDNLTYRDLYYFIFAPTLCYELNFPRSPRIRKRFLLRRVLEMLFFTQLQVGLIQQWMVPTIQNSMKPFKDMDYSRIIERLLKLAVPNHLIWLIFFYWLFHSCLNAVAELLQFGDREFYRDWWNAESVTYFWQNWNIPVHKWCIRHFYKPMLRLGSNKWMARTGVFWASAFFHEYLVSIPLRMFRLWAFTAMMAQVPLAWIVNRFFQGNYGNAAVWVTLIIGQPVAVLMYVHDYYVLNYDAPVGA

SEQ ID NO: 88 - protein, 488 aa, Homo sapiens
MGDRGSSRRRRTGSRPSSHGGGGPAAAEEEVRDAAAGPDVGAAGDAPAPAPNKDGDAGVGSGHWELRCHRLQDSLFSSDSGFSNYRGILNWCVVMLILSNARLFLENLIKYGILVDPIQVVSLFLKDPYSWPAPCLVIAANVFAVAAFQVEKRLAVGALTEQAGLLLHVANLATILCFPAAVVLLVESITPVGSLLALMAHTILFLKLFSYRDVNSWCRRARAKAASAGKKASSAAAPHTVSYPDNLTYRDLYYFLFAPTLCYELNFPRSPRIRKRFLLRRILEMLFFTQLQVGLIQQWMVPTIQNSMKPFKDMDYSRIIERLLKLAVPNHLIWLIFFYWLFHSCLNAVAELMQFGDREFYRDWWNSESVTYFWQNWNIPVHKWCIRHFYKPMLRRGSSKWMARTGVFLASAFFHEYLVSVPLRMFRLWAFTGMMAQIPLAWFVGRFFQGNYGNAAVWLSLIIGQPIAVLMYVHDYYVLNYEAPAAEA

SEQ ID NO: 89 - protein, 11 aa, Artificial Sequence
  conserved sequence
  X (4)..(4): Threonine (T) or Serine (S)
RGVXRHRWTGR

SEQ ID NO: 90 - protein, 8 aa, Artificial Sequence
  conserved sequence
  X (1)..(1): Phenylalanine (F) or Tyrosine (Y)
XEAHLWDK

SEQ ID NO: 91 - protein, 9 aa, Artificial Sequence
  conserved sequence
DLAALKYWG

SEQ ID NO: 92 - protein, 8 aa, Artificial Sequence
  conserved sequence
  misc_feature (2)..(2): Xaa can be any naturally occurring amino acid
  X (5)..(5): Serine (S) or Alanine (A)
  X (8)..(8): any amino acid
SXGFXRGX

SEQ ID NO: 93 - protein, 14 aa, Artificial Sequence
  conserved sequence
  X (3)..(3): Histidine (H) or Gutamine (Q)
  X (6)..(6): Arginine (R) or Lysine (K)
  X (12)..(12): Arginine (R) or Lysine (K)
  misc_feature (13)..(13): Xaa can be any naturally occurring amino acid
HHXNGXWEARIGXV

SEQ ID NO: 94 - protein, 9 aa, Artificial Sequence
  conserved sequence
  X (7)..(7): any amino acid
QEEAAAXYD

SEQ ID NO: 95 - protein, 165 aa, Brassica napus
MGILRKKKHERKPSFKSVLTAILATHAATFLLLIAGVSLAGTAAAFIATMPLFVVFSPILVPAGITTGLLTTGLAAAGGAGATAVTIILWLYKRATGKAPPKVLEKVLKKIIPGAAAAPAAAPGAAPAAAPAAAPAVAPAAAPAAAPAPKPAAPPAPKPAAAPSI

SEQ ID NO: 96 - protein, 193 aa, Brassica napus
MADVRTHAHQVQVHPLRQQEGGIKVVYPQSGPSSTQVLAVIAGVPVGGTLLTLAGLTLAGSVIGLMLAFPLFLIFSPVIVPAAFVIGLAMTGFMASGAIGLTGLSSMSWVLNHIRRVRERMPDELEEAKQRLADMAEYVGQRTKDAGQTIEEKAHDVRESKTYDVRDRDTKGHTATGGDRDTKTTREVRVATT

SEQ ID NO: 97 - protein, 188 aa, Brassica napus
MANVDRRVNVDRTDKGLQLQPQYEDRVGYGYGYGGNTDYKSCGPSTNQIVALIAGVPIGGSLLALAGLTLAGSVIGFMLSIPLFLLFSPVIVPAALTIGLAVTGILASGLFGLTGLSSVSWVLNYIRGRSDTVPEQLDYAKRRMADAVGYAGQKGKEMGQYVQDKAHEAHDTSLTTETNGKTRRAHIA

SEQ ID NO: 98 - protein, 180 aa, Brassica napus
MADTARTHHDITSRDQYPILGRDRDQYPYGRSDYQTSGQDYSKTRQIAKAATAVTAGGSLLVLSSLTLVGTVIALTVATTLLVIFSPILVPALITVALLITGFLSSGGFGIADITVFSWIYKYATGEHPQGSDKLDSARMKLGTKAQDIKDRAQYYGQQHTGGEHDRDRTRGTHHTTTTT

SEQ ID NO: 99 - protein, 210 aa, Brassica napus
MADTHRVDRTDRHLQFQSPYEGGRVSIQYEGGGGAGGYGGRGGGYGAEGYKSMMPERGPSSTQVLSFLVGVPIVGSLLAIAGLLLAGSVIGLLISIPLFLLFSPVIVPAALTIGLAATGFLASGMFGLTGLSSVSWVLNYLRGTRKSSVPEQLEYAKKRMADAVGYAGQKGKGMGQHVQNKAQEAKQYDISKTHDTTTKGHETTQRTAAA

SEQ ID NO: 100 - protein, 149 aa, Brassica napus
MANQTRTHQDIIVRDSRITLDRDHPKTGAQMVKVATGVAAGGSLLVLSGLTLAGTVIAFAVATPLLIIFSPVLVPAVITVVLIITGFLASGGFGIAAITAFSWLYRHMTGSGSDQKIESARMKVGSRGYDTKYGQHNIGVHQQHQQAAS

SEQ ID NO: 101 - protein, 137 aa, Arachis hypogaea
MAEALYYGGRQRQEQPRSTQLVKATTAVVAGGSLLILAGLVLAGTVIGLTTITPLFVIFSPVLVPAVITVALLGLGFLASGGFGVAAITVLTWIYRYVTGKHPPGANQLDTARHKLMGKAREIKDFGQQQTSGAQAS

SEQ ID NO: 102 - protein, 150 aa, Arachis hypogaea
MTDRTQPHAVQVHTTAGRFGDTAAGTNRYADRGPSTSKVIAVITGLPIGGTLLLFAGLALAGTLLGLAVTTPLFILFSPVIVPATIVVGLSVAGFLTSGACGLTGLSSFSWVMNYIRQTHGSVPEQLEMAKHRMADVAGYVGQKTKDVGQ

SEQ ID NO: 103 - protein, 166 aa, Arachis hypogaea
MSDQTRTGYGGGGSYGSSYGGGGTYGSSYGTSYDPSTNQPIRQAIKFMTASTIGVSFLILSGLILTGTVIGLIIATPLLVIFSPILVPAAITLALAAGGFLFSGGCGVAAIAALSWLYSYVTGKHPAGSDRLDYAKGVIADKARDVKDRAKDYAGAGRAQEGTPGY

SEQ ID NO: 104 - protein, 176 aa, Arachis hypogaea
MATATDRAPHQVQVHTPTTQRVDVPRRGYDVSGGGIKTLLPERGPSTSQIIAVLVGVPTGGTLLLLSGLSLLGTIIGLAIATPVFIFFSPVIVPAVVTIGLAVTGILTAGACGLTGLMSLSWMINFIRQVHGTTVPDQLDSVKRRMADMADYVGQKTKDAGQEIQTKAQDVKRSSS

SEQ ID NO: 105 - protein, 153 aa, Ricinus communis
MADRPQPHQVQVHRYDPTTGYKGQQKGPSASKVLAVLTFLPVGGGLLSLSGITLTNTLIGMAIATPLFILFGPIILPAAVVIGLAMMAFMVAGALGLSGLTSQSWALKYFREGTAMPESLDQAKKRMQDMAGYVGMKTKEVGQDIQRKAQEGK

SEQ ID NO: 106 - protein, 138 aa, Ricinus communis
MAEHQQSPVVSHRPRVNQLVKAGTAATAGSSLLFLSGLTLTGTVIALALATPLMVLFSPVLLPAVIIISLIGAGFLTSGGFGFGAILVLSWIYRYVTGKQPPGAESLDQARLKLAGKAREMKDRAEQFGQHVTGQQTS

SEQ ID NO: 107 - protein, 226 aa, Glycine max
MTTQVPPHSVQVHTTTTHRYEAGVVPPGARFETSYEAGVKAASIYHSERGPTTSQVLAVLAGLPVGGILLLLAGLTLAGTLTGLAVATPLFVLFSPVLVPATVAIGLAVAGFLTSGAFGLTALSSFSWILNYIRETQPASENLAAAAKHHLAEAAEYVGQKTKEVGQKTKEVGQDIQSKAQDTREAAARDAREAAARDAREAAARDAKVEARDVKRTTVTATTATA

SEQ ID NO: 108 - protein, 223 aa, Glycine max
MTTVPPHSVQVHTTTHRYEAGVVPPARFEAPRYEAGIKAPSSIYHSERGPTTSQVLAVVAGLPVGGILLLLAGLTLAGTLTGLVVATPLFIIFSPVLIPATVAIGLAVAGFLTSGVFGLTALSSFSWILNYIRETQPASENLAAAAKHHLAEAAEYVGQKTKEVGQKTKEVGQDIQSKAQDTREAAARDARDAREAAARDARDAKVEARDVKRTTVTATTATA

SEQ ID NO: 109 - protein, 155 aa, Linum usitatissimum
MDQTHQTYAGTTQNPSYGGGGTMYQQQQPRSYQAVKAATAATAGGSLIVLSGLILTATVISLIIATPLLVIFSPVLVPALITVGLLITGFLASGGFGVAAVTVLSWIYRYVTGGHPAGGDSLDQARSKLAGKAREVKDRASEFAQQHVTGGQQTS

SEQ ID NO: 110 - protein, 180 aa, Linum usitatissimum
MADRTTQPHQVQVHTQHHYPTGGAFGRYEGVLKGGPYHQQGTGSGPSASKVLAVMTALPIGGTLLALAGITLAGTMIGLAITTPIFVICSPVLVPAALLIGFAVSAFLASGMAGLTGLTSLSWFARYLQQAGQGVGVGVPDSFDQAKRRMQDAAGYMGQKTKEVGQEIQRKSQDVKASDK

SEQ ID NO: 111 - protein, 181 aa, Helianthus annuus
TTTTYDRHFTTTQPHYRQDDRSRYDQQTHSQSTSRTLAIIALLPVGGILLGLAALTFIGTLIGLALATPLFVIFSPIIVPAVLTIGLAVTGFLASGTFGLTGLSSLSYLFNMVRQTAGSVPESLDYVKGTLQDAGEYAGQKTKDFGQKIQSTAHEMGDQGQVGVHAQVGGGKEGRKSGDRT

SEQ ID NO: 112 - protein, 156 aa, Zea mays
MADHHRGATGGGGGYGDLQRGGGMHGEAQQQQKQGAMMTALKAATAATFGGSMLVLSGLILAGTVIALTVATPVLVIFSPVLVPAAIALALMAAGFVTSGGLGVAALSVFSWMYKYLTGKHPPAADQLDHAKARLASKARDVKDAAQHRIDQAQGS

SEQ ID NO: 113 - protein, 244 aa, Brassica napus
VSKPDDCRRIVDETISHFGRLDHLVNNAGIMQISMFENIEEITRTRAVMDTNFWGSVYTTRAALPYLRQSNGKIVAMSSSAAWLTAPRMSFYNASKAALLNFFETLRIELGSDVHITIVTPGYIESELTQGKYFSGEGELVVNQDIRDVQIGAFPVTSVSGCAKGIVKGVCRKQRYVTEPSWFKVTYLWKVFCPELIEWGCRLLFLSGHGTSEKNALNKKILDIPGVRSALYPESIRTPEIKSE

SEQ ID NO: 114 - protein, 349 aa, Brassica napus
MELINDFLNLTAPFFTFFGLCFFLPPFYFFKFVQSIFSTIFSENVYGKVVLITGASSGIGEQLAYEYASKGACLALTARRKNRLEEVAEIAREVGSPNVVTVHADVSKPDDCRRIVDETISHFGRLDHLVNNAGIMQISMFENIEEITRTRAVMDTNFWGAVYTTRAALPYLRQSNGKIVAMSSSAAWLTAPRMSFYNASKAALLNFFETLRIELGSDVHITIVTPGYIESELTQGKYVSGEGELVVNQDIRDVQIGAFPVTSVSGRAKGIVKGVCRKERYVTEPSWFKVTYLWKVFCPELIEWGCRLMFLSGHGTPEENALNKKILDIPGVRSALYPEPIRTPEIKSE

SEQ ID NO: 115 - protein, 456 aa, Brassica napus
MVDLLNSVMNLVAPPATMVVMAFSWPLLCFITFSERLYNSYFVTEDMEDKVVVITGASPAIGEQIAYEYAKRGANLVLVARREQRLRVVSNNARQIGANHVIIIAADVVKEDDCRRFITQAVNYYGRVDHLVNSASLGHTFYFDEVSDTTVFPHLLDINFWGNVYPTYVALPHLQKTNGRIVVNASVENWLPLPRMSLYSAAKAALVNFYETLRFELNGDVGITIATHGWIGSEMSRGKFMLEEGAEMQWKEEREVPANGGPLEEFAKMIVAGACRGDAYVKFPNWYDVFLLYRVFTPNVLRWTFKLLLSSEGSRQSSLVGVGQGLPPEESSSQMKLMLEGGSPRVTASPPRYTPSPSPPHHTASPPRYTPSPSPPHHTSSPQRYTPSPSPPHYTSSRHRYTPSPSPPHYTESPPLYTESPPHYTTSPNWYTESPPRYTPSPSPPRFSRFNIQELP

SEQ ID NO: 116 - protein, 348 aa, Sesamum indicum
MDLIHTFLNLIAPPFTFFFLLFFLPPFQIFKFFLSILGTLFSEDVAGKVVVITGASSGIGESLAYEYAKRGACLVLAARRERSLQEVAERARDLGSPDVVVVRADVSKAEDCRKVVDQTMNRFGRLDHLVNNAGIMSVSMLEEVEDITGYRETMDINFWGYVYMTRFAAPYLRNSRGRIVVLSSSSSWMPTPRMSFYNASKAAISQFFETLRVEFGPDIGITLVTPGFIESELTQGKFYNAGERVIDQDMRDVQVSTTPILRVESAARSIVRSAIRGERYVTEPAWFRVTYWWKLFCPEVMEWVFRLMYLASPGEPEKETFGKKVLDYTGVKSLLYPETVQVPEPKND

SEQ ID NO: 117 - protein, 350 aa, Zea mays
MLGMSRTGLAGAALRVALTALLPLVLPAYYVYKLTTYLLGAVFPEDVAGKVVLITGASSGIGEHLAYEYAKRGAYLALVARREASLREVGDVALGLGSPGVLVLPADVSKPRDCEGFIDDTISYFGRLDHLVNNASIWQVCKFEEIQDVRHLRALMDINFWGHVYPTRLAIPHLRRSRGRIVGVTSNSSYIFIGRNTFYNASKAAALSFYDTLRMELGSDIRITEVVPGVVESEITKGKMLTKGGEMKVDQDERDAILGPTPAEPVGDFARTVVRDVCRGARYVFEPRWYMGVYLLRACLPEVLAWNSRLLTVDTVGASTTDTLGKWLVELPGVRRVVQPPSLRSPEIKD

SEQ ID NO: 118 - protein, 245 aa, Brassica napus
MGTATEIMERDAMATVAPYAPVTFHRRARVDLDDRLPKPYMPRALQAPDREHPYGTPGHKNYGLSVLQQHVAFFDIDDNGIIYPWETYSGLRMIGFNIIGSLIIAAVINLALSYATLPGWLPSPFFPIYIHNIHKSKHGSDSRTYDNEGRFMPVNLELIFSKYAKTLPDKLSLGELWDMTEGQRDAWDIFGWFASKIEWGLLYLLARDEEGFLSKEAIRRCFDGSLFEYCAKIYVGINEDKTAYY

SEQ ID NO: 119 - protein, 244 aa, Brassica napus
MVRESMGEESEAFATTAPLAPVTGERKVRNDLEETLPKPYLARALVAPDTEHPNGSEGHDSKGMSVTQQHVAFFDQNGDGIVYPWETYAGFRDLGFNPISSVFWAIFINFAFSYVTLPSWLPSPLLPVYIDNIHKAKHGSDSSTYDTEGRYVPVNLENIFSKYALTAPNKITLKELWNLTEGNRMAIDPFGWLANKVEWLLVYLLAKDEEGFVSKEAVRGVFDASFFEYCAKKNKEKADSRKQD

SEQ ID NO: 120 - protein, 245 aa, Sesamum indicum
MATHVLAAAAERNAALAPDAPLAPVTMERPVRTDLETSIPKPYMARGLVAPDMDHPNGTPGHVHDNLSVLQQHCAFFDQDDNGIIYPWETYSGLRQIGFNVIASLIMAIVINVALSYPTLPGWIPSPFFPIYLYNIHKAKHGSDSGTYDTEGRYLPMNFENLFSKHARTMPDRLTLGELWSMTEANREAFDIFGWIASKMEWTLLYILARDQDGFLSKEAIRRCYDGSLFEYCAKMQRGAEDKMK

SEQ ID NO: 121 - protein, 243 aa, Zea mays
MSSYSPPPPPPRDQSMDTEAPNAPITRERRLNPDLQEQLPKPYLARALEAVDPSHPQGTKGRDPRGMSVLQQHAAFFDRNGDGVIYPWETFQGLRAIGCGLTVSFAFSILINLFLSYPTQPGWLPSPLLSIRIDNIHKGKHGSDSETYDTEGRFDPSKFDAIFSKYGRTHPNAITRDELSSMLQGNRNTYDFLGWLAAAGEWLLLYSLAKDKDGLLQRETVRGLFDGSLFERLEDDNNKKKSS

SEQ ID NO: 122 - DNA, 11142 bp, Artificial Sequence
  TDNA sequence
tcctgtggttggcatgcacatacaaatggacgaacggataaaccttttcacgcccttttaaatatccgattattctaataaacgctcttttctcttaggtttacccgccaatatatcctgtcaaacactgatagtttaaactgaaggcgggaaacgacaatctgctagtggatctcccagtcacgacgttgtaaaacgggcgccctagaatctaattattctattcagactaaattagtataagtatttttttaatcaataaataataattaataatttattagtaggagtgattgaatttataatatattttttttaatcatttaaagaatcttatatctttaaattgacaagagttttaaatggggagagtgttatcatatcacaagtaggattaatgtgttatagtttcacatgcattacgataagttgtgaaagataacattattatatataacaatgacaatcactagcgatcgagtagtgagagtcgtcttattacactttcttccttcgatctgtcacatggcggcggcccgaattctcacacaaggtagttgcaagacactgaagtggtggtagtggtagtagaagaagcagaatcggtagaaaggcaagacaatggagaagatgaagatggtggagattctcttcccacaacgcagcaatcaaggttttcaaggttaaggcactcgtgctttccatcatcgaacatgaagtcgatgttatcctcgaaagcaagctcgttgaagagttctgggtactcaattgggttctcgttagcaaggttttgatcggtaaggaatggggagaatccagtatccatcatgcagaagttccaagcaagttcgttgttatctccgcacctatccatttccatgatggtggaagaatcaatgcagcagttaacaacggcagcttcctcagaatatcccacaatttcagcctcttgttgctcagccttctcttcctctttttcttcttcctcttgaggtggttcctcaacgtattgttgcttaacctcttccctaggttcctctttagcttctctagtctcaacctcttgcttagcctcaacaagaataccctcttgatggttagcctggttaactgggaatgggaaaacgcccttcttcttaagcctgtcgatgtagttggagatatcgaagttggtaacagcgttagcacctctgtactcaatagcagccatatcataagcagctgcagcctcttcttgagtgttgtaagttccgaggtagaggtacttgtttccgaaaactcttccaatcctagcttcccatcttccgttatgatgatgcctagcaactcccctatacttagaaactcccctagagaatccagatgactgccttctaagggaagcaagatactcttctttggtcaccctctgcatctcttcaagttctttggtgtaagtctcagctgggaagttaagaatggtatctgggccccaatacttaagagcagcaagatcataggtatgagcagcagcctcttcagaatcataagctccaaggtaaacctgcttgcccttcttgttttggatggagttccaagaggacttatcccaaaggtgagcttcgaatcttccagtccatctatgcctagtaacacctctgtagatagatgaccttctggtagaagctggagaagttgggttatgagacttatcgccagatggagatgacttcttagccctcttagctctctttggtcttggagcttcagattgaattgggctagaggtagtagtagaagaggacactgaagaagatggagaactagagcaggtagaggtagtgagcctcttcttcatgaattctgttcttctttactctttgtgtgactgaggtttggtctagtgctttggtcatctatatataatgataacaacaatgagaacaagctttggagtgatcggagggtctaggatacatgagattcaagtggactaggatctacaccgttggattttgagtgtggatatgtgtgaggttaattttacttggtaacggccacaaaggcctaaggagaggtgttgagacccttatcggcttgaaccgctggaataatgccacgtggaagataattccatgaatcttatcgttatctatgagtgaaattgtgtgatggtggagtggtgcttgctcattttacttgcctggtggacttggccctttccttatggggaatttatattttacttactatagagctttcataccttttttttaccttggatttagttaatatataatggtatgattcatgaataaaaatgggaaatttttgaatttgtactgctaaatgcataagattaggtgaaactgtggaatatatatttttttcatttaaaagcaaaatttgccttttactagaattataaatatagaaaaatatataacattcaaataaaaatgaaaataagaactttcaaaaaacagaactatgtttaatgtgtaaagattagtcgcacatcaagtcatctgttacaatatgttacaacaagtcataagcccaacaaagttagcacgtctaaataaactaaagagtccacgaaaatattacaaatcataagcccaacaaagttattgatcaaaaaaaaaaaacgcccaacaaagctaaacaaagtccaaaaaaaacttctcaagtctccatcttcctttatgaacattgaaaactatacacaaaacaagtcagataaatctctttctgggcctgtcttcccaacctcctacatcacttccctatcggattgaatgttttacttgtaccttttccgttgcaatgatattgatagtatgtttgtgaaaactaatagggttaacaatcgaagtcatggaatatggatttggtccaagattttccgagagctttctagtagaaagcccatcaccagaaatttactagtaaaataaatcaccaattaggtttcttattatgtgccaaattcaatataattatagaggatatttcaaatgaaaacgtatgaatgttattagtaaatggtcaggtaagacattaaaaaaatcctacgtcagatattcaactttaaaaattcgatcagtgtggaattgtacaaaaatttgggatctactatatatatataatgctttacaacacttggatttttttttggaggctggaatttttaatctacatatttgttttggccatgcaccaactcattgtttagtgtaatactttgattttgtcaaatatatgtgttcgtgtatatttgtataagaatttctttgaccatatacacacacacatatatatatatatatatatattatatatcatgcacttttaattgaaaaaataatatatatatatatagtgcattttttctaacaaccatatatgttgcgattgatctgcaaaaatactgctagagtaatgaaaaatataatctattgctgaaattatctcagatgttaagattttcttaaagtaaattctttcaaattttagctaaaagtcttgtaataactaaagaataatacacaatctcgaccacggaaaaaaaacacataataaatttggggcccctagaatctaattattctattcagactaaattagtataagtatttttttaatcaataaataataattaataatttattagtaggagtgattgaatttataatatattttttttaatcatttaaagaatcttatatctttaaattgacaagagttttaaatggggagagtgttatcatatcacaagtaggattaatgtgttatagtttcacatgcattacgataagttgtgaaagataacattattatatataacaatgacaatcactagcgatcgagtagtgagagtcgtcttattacactttcttccttcgatctgtcacatggcggcggcccgcggccgcttcattactcgagccaggaggatggatcgatgctggtctgagaccctgctaccggttgctgactgaactgctcggcacggtccttcatttcacgggccttgctcgccaactttgtcttggccgactccaactgatccgctccgggtggatgtttccccgtcaggtaacggtagatccaggacagcacagacagagcggcaacaccaaatcccccgcttgccagaaaacccgctcccaacaggaagatggtgatgactgcagatcagaaaaactcagattaatcgacaaattcgatcgcacaaactagaaactaacaccagatctagatagaaatcacaaatcgaagagtaattattcgacaaaactcaaattatttgaacaaatcggatgatatctatgaaaccctaatcgagaattaagatgatatctaacgatcaaacccagaaaatcgtcttcgatctaagattaacagaatctaaaccaaagaacatatacgaaattgggatcgaacgaaaacaaaatcgaagattttgagagaataaggaacacagaaatttacctgcagggaccagtacaggcgagaagatcaccaggagaggtgtggcgattgtcagcgcaatgaccgttccagccagggtcaacccggataacaccaacaggctacctccggcagtaaccgcggtcgctgcctttacaacacgctgagcacgcggttgcagttgcaagtggggggcacgtgtttgttgctgctgcccgtagtgctctgccatggttttttttaacggagcaagcggccgctgttcttctttactctttgtgtgactgaggtttggtctagtgctttggtcatctatatataatgataacaacaatgagaacaagctttggagtgatcggagggtctaggatacatgagattcaagtggactaggatctacaccgttggattttgagtgtggatatgtgtgaggttaattttacttggtaacggccacaaaggcctaaggagaggtgttgagacccttatcggcttgaaccgctggaataatgccacgtggaagataattccatgaatcttatcgttatctatgagtgaaattgtgtgatggtggagtggtgcttgctcattttacttgcctggtggacttggccctttccttatggggaatttatattttacttactatagagctttcataccttttttttaccttggatttagttaatatataatggtatgattcatgaataaaaatgggaaatttttgaatttgtactgctaaatgcataagattaggtgaaactgtggaatatatatttttttcatttaaaagcaaaatttgccttttactagaattataaatatagaaaaatatataacattcaaataaaaatgaaaataagaactttcaaaaaacagaactatgtttaatgtgtaaagattagtcgcacatcaagtcatctgttacaatatgttacaacaagtcataagcccaacaaagttagcacgtctaaataaactaaagagtccacgaaaatattacaaatcataagcccaacaaagttattgatcaaaaaaaaaaaacgcccaacaaagctaaacaaagtccaaaaaaaacttctcaagtctccatcttcctttatgaacattgaaaactatacacaaaacaagtcagataaatctctttctgggcctgtcttcccaacctcctacatcacttccctatcggattgaatgttttacttgtaccttttccgttgcaatgatattgatagtatgtttgtgaaaactaatagggttaacaatcgaagtcatggaatatggatttggtccaagattttccgagagctttctagtagaaagcccatcaccagaaatttactagtaaaataaatcaccaattaggtttcttattatgtgccaaattcaatataattatagaggatatttcaaatgaaaacgtatgaatgttattagtaaatggtcaggtaagacattaaaaaaatcctacgtcagatattcaactttaaaaattcgatcagtgtggaattgtacaaaaatttgggatctactatatatatataatgctttacaacacttggatttttttttggaggctggaatttttaatctacatatttgttttggccatgcaccaactcattgtttagtgtaatactttgattttgtcaaatatatgtgttcgtgtatatttgtataagaatttctttgaccatatacacacacacatatatatatatatatatatattatatatcatgcacttttaattgaaaaaataatatatatatatatagtgcattttttctaacaaccatatatgttgcgattgatctgcaaaaatactgctagagtaatgaaaaatataatctattgctgaaattatctcagatgttaagattttcttaaagtaaattctttcaaattttagctaaaagtcttgtaataactaaagaataatacacaatctcgaccacggaaaaaaaacacataataaatttgggcgcgccgcgtattggctagagcagcttgccaacatggtggagcacgacactctcgtctactccaagaatatcaaagatacagtctcagaagaccaaagggctattgagacttttcaacaaagggtaatatcgggaaacctcctcggattccattgcccagctatctgtcacttcatcaaaaggacagtagaaaaggaaggtggcacctacaaatgccatcattgcgataaaggaaaggctatcgttcaagatgcctctgccgacagtggtcccaaagatggacccccacccacgaggagcatcgtggaaaaagaagacgttccaaccacgtcttcaaagcaagtggattgatgtgataacatggtggagcacgacactctcgtctactccaagaatatcaaagatacagtctcagaagaccaaagggctattgagacttttcaacaaagggtaatatcgggaaacctcctcggattccattgcccagctatctgtcacttcatcaaaaggacagtagaaaaggaaggtggcacctacaaatgccatcattgcgataaaggaaaggctatcgttcaagatgcctctgccgacagtggtcccaaagatggacccccacccacgaggagcatcgtggaaaaagaagacgttccaaccacgtcttcaaagcaagtggattgatgtgatatctccactgacgtaagggatgacgcacaatcccactatccttcgcaagaccttcctctatataaggaagttcatttcatttggagaggacacgctgaaatcaccagtctctctctacaaatctatctctgcgatcgcatggcgattttggattctgctggcgttactacggtgacggagaacggtggcggagagttcgtcgatcttgataggcttcgtcgacggaaatcgagatcggattcttctaacggacttcttctctctggttccgataataattctccttcggatgatgttggagctcccgccgacgttagggatcggattgattccgttgttaacgatgacgctcagggaacagccaatttggccggagataataacggtggtggcgataataacggtggtggaagaggcggcggagaaggaagaggaaacgccgatgctacgtttacgtatcgaccgtcggttccagctcatcggagggcgagagagagtccacttagctccgacgcaatcttcaaacagagccatgccggattattcaacctctgtgtagtagttcttattgctgtaaacagtagactcatcatcgaaaatcttatgaagtatggttggttgatcagaacggatttctggtttagttcaagatcgctgcgagattggccgcttttcatgtgttgtatatccctttcgatctttcctttggctgcctttacggttgagaaattggtacttcagaaatacatatcagaacctgttgtcatctttcttcatattattatcaccatgacagaggttttgtatccagtttacgtcaccctaaggtgtgattctgcttttttatcaggtgtcactttgatgctcctcacttgcattgtgtggctaaagttggtttcttatgctcatactagctatgacataagatccctagccaatgcagctgataaggccaatcctgaagtctcctactacgttagcttgaagagcttggcatatttcatggtcgctcccacattgtgttatcagccaagttatccacgttctgcatgtatacggaagggttgggtggctcgtcaatttgcaaaactggtcatattcaccggattcatgggatttataatagaacaatatataaatcctattgtcaggaactcaaagcatcctttgaaaggcgatcttctatatgctattgaaagagtgttgaagctttcagttccaaatttatatgtgtggctctgcatgttctactgcttcttccacctttggttaaacatattggcagagcttctctgcttcggggatcgtgaattctacaaagattggtggaatgcaaaaagtgtgggagattactggagaatgtggaatatgcctgttcataaatggatggttcgacatatatacttcccgtgcttgcgcagcaagataccaaagacactcgccattatcattgctttcctagtctctgcagtctttcatgagctatgcatcgcagttccttgtcgtctcttcaagctatgggcttttcttgggattatgtttcaggtgcctttggtcttcatcacaaactatctacaggaaaggtttggctcaacggtggggaacatgatcttctggttcatcttctgcattttcggacaaccgatgtgtgtgcttctttattaccacgacctgatgaaccgaaaaggatcgatgtcatgagcgatcgcgatcgttcaaacatttggcaataaagtttcttaagattgaatcctgttgccggtcttgcgatgattatcatataatttctgttgaattacgttaagcatgtaataattaacatgtaatgcatgacgttatttatgagatgggtttttatgattagagtcccgcaattatacatttaatacgcgatagaaaacaaaatatagcgcgcaaactaggataaattatcgcgcgcggtgtcatctatgttactagatccctgcagggcgtattggctagagcagcttgccaacatggtggagcacgacactctcgtctactccaagaatatcaaagatacagtctcagaagaccaaagggctattgagacttttcaacaaagggtaatatcgggaaacctcctcggattccattgcccagctatctgtcacttcatcaaaaggacagtagaaaaggaaggtggcacctacaaatgccatcattgcgataaaggaaaggctatcgttcaagatgcctctgccgacagtggtcccaaagatggacccccacccacgaggagcatcgtggaaaaagaagacgttccaaccacgtcttcaaagcaagtggattgatgtgataacatggtggagcacgacactctcgtctactccaagaatatcaaagatacagtctcagaagaccaaagggctattgagacttttcaacaaagggtaatatcgggaaacctcctcggattccattgcccagctatctgtcacttcatcaaaaggacagtagaaaaggaaggtggcacctacaaatgccatcattgcgataaaggaaaggctatcgttcaagatgcctctgccgacagtggtcccaaagatggacccccacccacgaggagcatcgtggaaaaagaagacgttccaaccacgtcttcaaagcaagtggattgatgtgatatctccactgacgtaagggatgacgcacaatcccactatccttcgcaagaccttcctctatataaggaagttcatttcatttggagaggacacgctgaaatcaccagtctctctctacaaatctatctctctcgagatgattgaacaagatggattgcacgcaggttctccggccgcttgggtggagaggctattcggctatgactgggcacaacagacaatcggctgctctgatgccgccgtgttccggctgtcagcgcaggggaggccggttctttttgtcaagaccgacctgtccggtgccctgaatgaacttcaagacgaggcagcgcggctatcgtggctggccacgacgggcgttccttgcgcagctgtgctcgacgttgtcactgaagcgggaagggactggctgctattgggcgaagtgccggggcaggatctcctgtcatctcaccttgctcctgccgagaaagtatccatcatggctgatgcaatgcggcggctgcatacgcttgatccggctacctgcccattcgaccaccaagcgaaacatcgcatcgagcgagcacgtactcggatggaagccggtcttgtcgatcaggatgatctggacgaagagcatcaggggctcgcgccagccgaactgttcgccaggctcaaggcgcgcatgcccgacggcgaggatctcgtcgtgactcatggcgatgcctgcttgccgaatatcatggtggaaaatggccgcttttctggattcatcgactgtggccggctgggtgtggcggaccgctatcaggacatagcgttggctacccgtgatattgctgaagagcttggcggcgaatgggctgaccgcttcctcgtgctttacggtatcgccgctcccgattcgcagcgcatcgccttctatcgccttcttgacgagttcttctgaaacgcgtgatcgttcaaacatttggcaataaagtttcttaagattgaatcctgttgccggtcttgcgatgattatcatataatttctgttgaattacgttaagcatgtaataattaacatgtaatgcatgacgttatttatgagatgggtttttatgattagagtcccgcaattatacatttaatacgcgatagaaaacaaaatatagcgcgcaaactaggataaattatcgcgcgcggtgtcatctatgttactagatcgacgtccgtacggttaaaaccaccccagtacattaaaaacgtccgcaatgtgttattaagttgtctaagcgtcaatttgtttacaccacaatatatcctgccaccagccagccaacagctccccgaccggcagctcggcacaaaatcaccactcgatacaggcagcccatcagtcc

SEQ ID NO: 123 - DNA, 16749 bp, Artificial Sequence
  vector sequence
gcttcctcgtgctttacggtatcgccgctcccgattcgcagcgcatcgccttctatcgccttcttgacgagttcttctgaaacgcgtgatcgttcaaacatttggcaataaagtttcttaagattgaatcctgttgccggtcttgcgatgattatcatataatttctgttgaattacgttaagcatgtaataattaacatgtaatgcatgacgttatttatgagatgggtttttatgattagagtcccgcaattatacatttaatacgcgatagaaaacaaaatatagcgcgcaaactaggataaattatcgcgcgcggtgtcatctatgttactagatcgacgtccgtacggttaaaaccaccccagtacattaaaaacgtccgcaatgtgttattaagttgtctaagcgtcaatttgtttacaccacaatatatcctgccaccagccagccaacagctccccgaccggcagctcggcacaaaatcaccactcgatacaggcagcccatcagtccactagacgctcaccgggctggttgccctcgccgctgggctggcggccgtctatggccctgcaaacgcgccagaaacgccgtcgaagccgtgtgcgagacaccgcagccgccggcgttgtggatacctcgcggaaaacttggccctcactgacagatgaggggcggacgttgacacttgaggggccgactcacccggcgcggcgttgacagatgaggggcaggctcgatttcggccggcgacgtggagctggccagcctcgcaaatcggcgaaaacgcctgattttacgcgagtttcccacagatgatgtggacaagcctggggataagtgccctgcggtattgacacttgaggggcgcgactactgacagatgaggggcgcgatccttgacacttgaggggcagagtgctgacagatgaggggcgcacctattgacatttgaggggctgtccacaggcagaaaatccagcatttgcaagggtttccgcccgtttttcggccaccgctaacctgtcttttaacctgcttttaaaccaatatttataaaccttgtttttaaccagggctgcgccctgtgcgcgtgaccgcgcacgccgaaggggggtgcccccccttctcgaaccctcccggcccgctctcgcgttggcagcatcacccataattgtggtttcaaaatcggctccgtcgatactatgttatacgccaactttgaaaacaactttgaaaaagctgttttctggtatttaaggttttagaatgcaaggaacagtgaattggagttcgtcttgttataattagcttcttggggtatttaaatactgtagaaaagaggaaggaaataataaatggctaaaatgagaatatcaccggaattgaaaaaactgatcgaaaaataccgctgcgtaaaagatacggaaggaatgtctcctgctaaggtatataagctggtgggagaaaatgaaaacctatatttaaaaatgacggacagccggtataaagggaccacctatgatgtggaacgggaaaaggacatgatgctatggctggaaggaaagctgcctgttccaaaggtcctgcaccttgaacggcatgatggctggagcaatctgctcatgagtgaggccgatggcgtcctttgctcggaagagtatgaagatgaacaaagccctgaaaagattatcgagctgtatgcggagtgcatcaggctctttcactccatcgacatatcggattgtccctatacgaatagcttagacagccgcttagccgaattggattacttactgaataacgatctggccgatgtggattgcgaaaactgggaagaagacaccccatttaaagatccgcgcgagctgtatgattttttaaagacggaaaagcccgaagaggaacttgtcttttcccacggcgacctgggagacagcaacatctttgtgaaagatggcaaagtaagtggctttattgatcttgggagaagcggcagggcggacaagtggtatgacattgccttctgcgtccggtcgatcagggaggatattggggaagaacagtatgtcgagctattttttgacttactggggatcaagcctgattgggagaaaataaaatattatattttactggatgaattgttttagtacctagatgtggcgcaacgatgctggcgacaagcaggagcgcaccgacttcttccgcatcaagtgttttggctctcaggccgaggcccacggcaagtatttgggcaaggggtcgctggtattcgtgcagggcaagattcggaataccaagtacgagaaggacggccagacggtctacgggaccgacttcattgccgataaggtggattatctggacaccaaggcaccaggcggatcaaatcaggaataagggcacattgccccggcgtgagtcggggcaatcccgcaaggagggtgaatgaatcggacgtttgaccggaaggcatacaggcaagaactgatcgacgcggggttttccgccgaggatgccgaaaccatcgcaagccgcaccgtcatgcgtgcgccccgcgaaaccttccagtccgtcggctcgatggcccagcaagctacggccaagatcgagcgcgacagcgtgcaactggctccccctgccctgcccgcgccatcggccgccgtggagcgttcgcgtcgtctcgaacaggaggcggcaggtttggcgaagtcgatgaccatcgacacgcgaggaactatgacgaccaagaagcgaaaaaccgccggcgaggacctggcaaaacaggtcagcgaggccaagcaagccgcgttgctgaaacacacgaagcagcagatcaaggaaatgcagctttccttgttcgatattgcgccgtggccggacacgatgcgagcgatgccaaacgacacggcccgctctgccctgttcaccacgcgcaacaagaaaatcccgcgcgaggcgctgcaaaacaaggtcattttccacgtcaacaaggacgtgaagatcacctacaccggcgtcgagctgcgggccgacgatgacgaactggtgtggcagcaggtgttggagtacgcgaagcgcacccctatcggcgagccgatcaccttcacgttctacgagctttgccaggacctgggctggtcgatcaatggccggtattacacgaaggccgaggaatgcctgtcgcgcctacaggcgacggcgatgggcttcacgtccgaccgcgttgggcacctggaatcggtgtcgctgctgcaccgcttccgcgtcctggaccgtggcaagaaaacgtcccgttgccaggtcctgatcgacgaggaaatcgtcgtgctgtttgctggcgaccactacacgaaattcatatgggagaagtaccgcaagctgtcgccgacggcccgacggatgttcgactatttcagctcgcaccgggagccgtacccgctcaagctggaaaccttccgcctcatgtgcggatcggattccacccgcgtgaagaagtggcgcgagcaggtcggcgaagcctgcgaagagttgcgaggcagcggcctggtggaacacgcctgggtcaatgatgacctggtgcattgcaaacgctagggccttgtggggtcagttccggctgggggttcagcagccagcgctttactgagatcctcttccgcttcctcgctcactgactcgctgcgctcggtcgttcggctgcggcgagcggtatcagctcactcaaaggcggtaatacggttatccacagaatcaggggataacgcaggaaagaacatgtgagcaaaaggccagcaaaaggccaggaaccgtaaaaaggccgcgttgctggcgtttttccataggctccgcccccctgacgagcatcacaaaaatcgacgctcaagtcagaggtggcgaaacccgacaggactataaagataccaggcgtttccccctggaagctccctcgtgcgctctcctgttccgaccctgccgcttaccggatacctgtccgcctttctcccttcgggaagcgtggcgctttctcatagctcacgctgtaggtatctcagttcggtgtaggtcgttcgctccaagctgggctgtgtgcacgaaccccccgttcagcccgaccgctgcgccttatccggtaactatcgtcttgagtccaacccggtaagacacgacttatcgccactggcagcagccactggtaacaggattagcagagcgaggtatgtaggcggtgctacagagttcttgaagtggtggcctaactacggctacactagaagaacagtatttggtatctgcgctctgctgaagccagttaccttcggaaaaagagttggtagctcttgatccggcaaacaaaccaccgctggtagcggtggtttttttgtttgcaagcagcagattacgcgcagaaaaaaaggatctcaagaagatcctttgatcttttctacggggtctgacgctcagtggaacgaaaactcacgttaagggattttggtcatgagattatcaaaaaggatcttcacctagatccttttggatctcctgtggttggcatgcacatacaaatggacgaacggataaaccttttcacgcccttttaaatatccgattattctaataaacgctcttttctcttaggtttacccgccaatatatcctgtcaaacactgatagtttaaactgaaggcgggaaacgacaatctgctagtggatctcccagtcacgacgttgtaaaacgggcgtctgcgatcgctgaagttcctatacttttcagagaataggaacttcggaataggaacttcccatgggatctagtaacatagatgacaccgcgcgcgataatttatcctagtttgcgcgctatattttgttttctatcgcgtattaaatgtataattgcgggactctaatcataaaaacccatctcataaataacgtcatgcattacatgttaattattacatgcttaacgtaattcaacagaaattatatgataatcatcgcaagaccggcaacaggattcaatcttaagaaactttattgccaaatgtttgaacgatcacgctagcggataacaatttcacacagggatatcactagtaaaaggtaccgagctcctgcagtatcgatgcggccgcaaagtcgacgaattctcattagcagaactcaagatgctgatcctctggaacgttgaacttgagcttgtgttcctcgaaaagcttgcacaactctttgatgtaacgctggtgaagtctatcaacttcctctctagaaggctgaggagtcatttgaacctcgataggctttccaacgatagtagtgataggctgtctgaaaggcatgagtccgaaagagtattggaaaactccccttccatggaaaagtggaaggctgattcccataatcttttggagtctgttctggatccatctaagccaagttccaggagtgttctcaacctggttgaagaggttgttctctccgaatgagaagataggaacaagagcagcaccatgcataagagcaagtctgatgaatcccttacggttcttcaagagaagtctgtaagcaccaggtctagcatcaagagcctcttgagcacctccaacgatgatagcaagaaggtttccaccaccctttctgctaaggatgtgatcagcagaaactttctcgctagacacgagtccaccagacatgatgtaatctctgaagaatggagccctgaaccaaacggtaagcatcataaggtaggatctgattccagggaacaaagaggtgaatccagtagactcagtacagaggttaaggaaagcaccagcagcaagaacaccatgaggatggaatccagcaatgtagttacggctaggatcaagctcagcagtcttaacgagagacacagggaagtaatccttcatgtacttccagatggccaatcttctgaagaattggataggtctaccaccttgtctaggcttatcccaatccaagtaccaccaggtagcgtaaagaacagagaaaagccagaacctggtgaacaagagtccaacgaagataacgatgcagagttgagcaagagcaaggaatgagaaaacccactgaagaacagcgaaagtctgcaatcttctctcccaaggaacaagaagtggagcgaactcgaccatgaattcagtcccccgtgttctctccaaatgaaatgaacttccttatatagaggaagggtcttgcgaaggatagtgggattgtgcgtcatcccttacgtcagtggagatatcacatcaatccacttgctttgaagacgtggttggaacgtcttctttttccacgatgctcctcgtgggtgggggtccatctttgggaccactgtcggcagaggcatcttcaacgatggcctttcctttatcgcaatgatggcatttgtaggagccaccttccttttccactatcttcacaataaagtgacagatagctgggcaatggaatccgaggaggtttccggatattaccctttgttgaaaagtctcaattgccctttggtcttctgagactgtatctttgatatttttggagtagacaagtgtgtcgtgctccaccatgttgacgaagattttcttcttgtcattgagtcgtaagagactctgtatgaactgttcgccagtctttacggcgagttctgttaggtcctctatttgaatctttgactccatgggatccaagggccctagaatctaattattctattcagactaaattagtataagtatttttttaatcaataaataataattaataatttattagtaggagtgattgaatttataatatattttttttaatcatttaaagaatcttatatctttaaattgacaagagttttaaatggggagagtgttatcatatcacaagtaggattaatgtgttatagtttcacatgcattacgataagttgtgaaagataacattattatatataacaatgacaatcactagcgatcgagtagtgagagtcgtcttattacactttcttccttcgatctgtcacatggcggcggcccgaattctcacacaaggtagttgcaagacactgaagtggtggtagtggtagtagaagaagcagaatcggtagaaaggcaagacaatggagaagatgaagatggtggagattctcttcccacaacgcagcaatcaaggttttcaaggttaaggcactcgtgctttccatcatcgaacatgaagtcgatgttatcctcgaaagcaagctcgttgaagagttctgggtactcaattgggttctcgttagcaaggttttgatcggtaaggaatggggagaatccagtatccatcatgcagaagttccaagcaagttcgttgttatctccgcacctatccatttccatgatggtggaagaatcaatgcagcagttaacaacggcagcttcctcagaatatcccacaatttcagcctcttgttgctcagccttctcttcctctttttcttcttcctcttgaggtggttcctcaacgtattgttgcttaacctcttccctaggttcctctttagcttctctagtctcaacctcttgcttagcctcaacaagaataccctcttgatggttagcctggttaactgggaatgggaaaacgcccttcttcttaagcctgtcgatgtagttggagatatcgaagttggtaacagcgttagcacctctgtactcaatagcagccatatcataagcagctgcagcctcttcttgagtgttgtaagttccgaggtagaggtacttgtttccgaaaactcttccaatcctagcttcccatcttccgttatgatgatgcctagcaactcccctatacttagaaactcccctagagaatccagatgactgccttctaagggaagcaagatactcttctttggtcaccctctgcatctcttcaagttctttggtgtaagtctcagctgggaagttaagaatggtatctgggccccaatacttaagagcagcaagatcataggtatgagcagcagcctcttcagaatcataagctccaaggtaaacctgcttgcccttcttgttttggatggagttccaagaggacttatcccaaaggtgagcttcgaatcttccagtccatctatgcctagtaacacctctgtagatagatgaccttctggtagaagctggagaagttgggttatgagacttatcgccagatggagatgacttcttagccctcttagctctctttggtcttggagcttcagattgaattgggctagaggtagtagtagaagaggacactgaagaagatggagaactagagcaggtagaggtagtgagcctcttcttcatgaattcactagtgattaaattttgttggtgctttgagcatataacaagcatggtatatataggcacgtaaacaagttgagaaattttactttgagtttgacataaccaataaaagttagtgctgtttattacctcactcagtttgcaccgcaactgtcgttagtgatgtttacctttcctttttctattatttattagtattatataatatatatatatgtgtgatgagacttgaaattgtttagcaccgcaaatgtccttcttgaggggaggttttcttttgctgaggttggggtgtcacatacacccccctctatggactcaacgtccttgctgaggtttaccccacactacatgagatttttctagactcaatactatgatatttctcgccttatcggaattggttaaactcagttgaagttagggtcatatcgataaaattgacacatgatcgactctgatattaaacagattctctccctcgaacctcactcactttcctttttctattctttattagtattatataatagatccgttccaaccattcacgtacataagaagagagatatttttttttaatggactaacatgacaaataaaacaaacaaaggagtaatgatcactacaacaaattagattatgagggacaaataatttcatcatctataaatcatgtttcgtcactaaaaattttgtgtgacgaaaaagatttcgtcaatcagttgtcactaaaaatatacaaagacgatttaatgatgtttacctttccttttctattctttattagtattatataataaatatatgtgtgatgagacttgaaattgtttagcaccgcaaatgtccttgttgaagggaggttttcttttgctgaggttggggtgtcacatacaccccctctatggactgaacgtcctttttgaggtttattttacactgcatgagatttttctagattcaacattatgatttctagactcaacactacgatcgtcactaaagactattttttatatataaaaaaaatactttgtccttaaatgtataaattagggataaatttattattataaaaaaggttaataattttgtgattaaatctattattttgtcactgaaagtgtttgcttttaccgacgacatatatgtcactaaatattatcataagtagtgacaattacaattgtcacaaaataaaaaaaattattcatattcaacaaaaaagggtactacgacaatacattttttgtcactgaaagtaatcaagttgtgataaattaatttatttaatgacaaaaatatttgtatcaaaattcacccatgatcatataataaaaataactaaaattatactaaagcataaatgacaagaaaatctaactaaaacatatcaaatattactcctaaacaaagacatataagtaaaaatttcttccaaagtatcaataacgtggtgacacatagcttgcaatcaatcttgcttcaattttcaccttttatacctgtaaaaagaaagagaaaataaaacaatgatttaaaaatcgaattcccgcggcccctagaatctaattattctattcagactaaattagtataagtatttttttaatcaataaataataattaataatttattagtaggagtgattgaatttataatatattttttttaatcatttaaagaatcttatatctttaaattgacaagagttttaaatggggagagtgttatcatatcacaagtaggattaatgtgttatagtttcacatgcattacgataagttgtgaaagataacattattatatataacaatgacaatcactagcgatcgagtagtgagagtcgtcttattacactttcttccttcgatctgtcacatggcggcggcccgcggccgcttcattactcgagccaggaggatggatcgatgctggtctgagaccctgctaccggttgctgactgaactgctcggcacggtccttcatttcacgggccttgctcgccaactttgtcttggccgactccaactgatccgctccgggtggatgtttccccgtcaggtaacggtagatccaggacagcacagacagagcggcaacaccaaatcccccgcttgccagaaaacccgctcccaacaggaagatggtgatgactgcagatcagaaaaactcagattaatcgacaaattcgatcgcacaaactagaaactaacaccagatctagatagaaatcacaaatcgaagagtaattattcgacaaaactcaaattatttgaacaaatcggatgatatctatgaaaccctaatcgagaattaagatgatatctaacgatcaaacccagaaaatcgtcttcgatctaagattaacagaatctaaaccaaagaacatatacgaaattgggatcgaacgaaaacaaaatcgaagattttgagagaataaggaacacagaaatttacctgcagggaccagtacaggcgagaagatcaccaggagaggtgtggcgattgtcagcgcaatgaccgttccagccagggtcaacccggataacaccaacaggctacctccggcagtaaccgcggtcgctgcctttacaacacgctgagcacgcggttgcagttgcaagtggggggcacgtgtttgttgctgctgcccgtagtgctctgccatggaaattttgttggtgctttgagcatataacaagcatggtatatataggcacgtaaacaagttgagaaattttactttgagtttgacataaccaataaaagttagtgctgtttattacctcactcagtttgcaccgcaactgtcgttagtgatgtttacctttcctttttctattatttattagtattatataatatatatatatgtgtgatgagacttgaaattgtttagcaccgcaaatgtccttcttgaggggaggttttcttttgctgaggttggggtgtcacatacacccccctctatggactcaacgtccttgctgaggtttaccccacactacatgagatttttctagactcaatactatgatatttctcgccttatcggaattggttaaactcagttgaagttagggtcatatcgataaaattgacacatgatcgactctgatattaaacagattctctccctcgaacctcactcactttcctttttctattctttattagtattatataatagatccgttccaaccattcacgtacataagaagagagatatttttttttaatggactaacatgacaaataaaacaaacaaaggagtaatgatcactacaacaaattagattatgagggacaaataatttcatcatctataaatcatgtttcgtcactaaaaattttgtgtgacgaaaaagatttcgtcaatcagttgtcactaaaaatatacaaagacgatttaatgatgtttacctttccttttctattctttattagtattatataataaatatatgtgtgatgagacttgaaattgtttagcaccgcaaatgtccttgttgaagggaggttttcttttgctgaggttggggtgtcacatacaccccctctatggactgaacgtcctttttgaggtttattttacactgcatgagatttttctagattcaacattatgatttctagactcaacactacgatcgtcactaaagactattttttatatataaaaaaaatactttgtccttaaatgtataaattagggataaatttattattataaaaaaggttaataattttgtgattaaatctattattttgtcactgaaagtgtttgcttttaccgacgacatatatgtcactaaatattatcataagtagtgacaattacaattgtcacaaaataaaaaaaattattcatattcaacaaaaaagggtactacgacaatacattttttgtcactgaaagtaatcaagttgtgataaattaatttatttaatgacaaaaatatttgtatcaaaattcacccatgatcatataataaaaataactaaaattatactaaagcataaatgacaagaaaatctaactaaaacatatcaaatattactcctaaacaaagacatataagtaaaaatttcttccaaagtatcaataacgtggtgacacatagcttgcaatcaatcttgcttcaattttcaccttttatacctgtaaaaagaaagagaaaataaaacaatgatttaaaggcgcgccgcgtattggctagagcagcttgccaacatggtggagcacgacactctcgtctactccaagaatatcaaagatacagtctcagaagaccaaagggctattgagacttttcaacaaagggtaatatcgggaaacctcctcggattccattgcccagctatctgtcacttcatcaaaaggacagtagaaaaggaaggtggcacctacaaatgccatcattgcgataaaggaaaggctatcgttcaagatgcctctgccgacagtggtcccaaagatggacccccacccacgaggagcatcgtggaaaaagaagacgttccaaccacgtcttcaaagcaagtggattgatgtgataacatggtggagcacgacactctcgtctactccaagaatatcaaagatacagtctcagaagaccaaagggctattgagacttttcaacaaagggtaatatcgggaaacctcctcggattccattgcccagctatctgtcacttcatcaaaaggacagtagaaaaggaaggtggcacctacaaatgccatcattgcgataaaggaaaggctatcgttcaagatgcctctgccgacagtggtcccaaagatggacccccacccacgaggagcatcgtggaaaaagaagacgttccaaccacgtcttcaaagcaagtggattgatgtgatatctccactgacgtaagggatgacgcacaatcccactatccttcgcaagaccttcctctatataaggaagttcatttcatttggagaggacacgctgaaatcaccagtctctctctacaaatctatctctgcgatcgcatggcgattttggattctgctggcgttactacggtgacggagaacggtggcggagagttcgtcgatcttgataggcttcgtcgacggaaatcgagatcggattcttctaacggacttcttctctctggttccgataataattctccttcggatgatgttggagctcccgccgacgttagggatcggattgattccgttgttaacgatgacgctcagggaacagccaatttggccggagataataacggtggtggcgataataacggtggtggaagaggcggcggagaaggaagaggaaacgccgatgctacgtttacgtatcgaccgtcggttccagctcatcggagggcgagagagagtccacttagctccgacgcaatcttcaaacagagccatgccggattattcaacctctgtgtagtagttcttattgctgtaaacagtagactcatcatcgaaaatcttatgaagtatggttggttgatcagaacggatttctggtttagttcaagatcgctgcgagattggccgcttttcatgtgttgtatatccctttcgatctttcctttggctgcctttacggttgagaaattggtacttcagaaatacatatcagaacctgttgtcatctttcttcatattattatcaccatgacagaggttttgtatccagtttacgtcaccctaaggtgtgattctgcttttttatcaggtgtcactttgatgctcctcacttgcattgtgtggctaaagttggtttcttatgctcatactagctatgacataagatccctagccaatgcagctgataaggccaatcctgaagtctcctactacgttagcttgaagagcttggcatatttcatggtcgctcccacattgtgttatcagccaagttatccacgttctgcatgtatacggaagggttgggtggctcgtcaatttgcaaaactggtcatattcaccggattcatgggatttataatagaacaatatataaatcctattgtcaggaactcaaagcatcctttgaaaggcgatcttctatatgctattgaaagagtgttgaagctttcagttccaaatttatatgtgtggctctgcatgttctactgcttcttccacctttggttaaacatattggcagagcttctctgcttcggggatcgtgaattctacaaagattggtggaatgcaaaaagtgtgggagattactggagaatgtggaatatgcctgttcataaatggatggttcgacatatatacttcccgtgcttgcgcagcaagataccaaagacactcgccattatcattgctttcctagtctctgcagtctttcatgagctatgcatcgcagttccttgtcgtctcttcaagctatgggcttttcttgggattatgtttcaggtgcctttggtcttcatcacaaactatctacaggaaaggtttggctcaacggtggggaacatgatcttctggttcatcttctgcattttcggacaaccgatgtgtgtgcttctttattaccacgacctgatgaaccgaaaaggatcgatgtcatgagcgatcgcgatcgttcaaacatttggcaataaagtttcttaagattgaatcctgttgccggtcttgcgatgattatcatataatttctgttgaattacgttaagcatgtaataattaacatgtaatgcatgacgttatttatgagatgggtttttatgattagagtcccgcaattatacatttaatacgcgatagaaaacaaaatatagcgcgcaaactaggataaattatcgcgcgcggtgtcatctatgttactagatccctgcagggcgtattggctagagcagcttgccaacatggtggagcacgacactctcgtctactccaagaatatcaaagatacagtctcagaagaccaaagggctattgagacttttcaacaaagggtaatatcgggaaacctcctcggattccattgcccagctatctgtcacttcatcaaaaggacagtagaaaaggaaggtggcacctacaaatgccatcattgcgataaaggaaaggctatcgttcaagatgcctctgccgacagtggtcccaaagatggacccccacccacgaggagcatcgtggaaaaagaagacgttccaaccacgtcttcaaagcaagtggattgatgtgataacatggtggagcacgacactctcgtctactccaagaatatcaaagatacagtctcagaagaccaaagggctattgagacttttcaacaaagggtaatatcgggaaacctcctcggattccattgcccagctatctgtcacttcatcaaaaggacagtagaaaaggaaggtggcacctacaaatgccatcattgcgataaaggaaaggctatcgttcaagatgcctctgccgacagtggtcccaaagatggacccccacccacgaggagcatcgtggaaaaagaagacgttccaaccacgtcttcaaagcaagtggattgatgtgatatctccactgacgtaagggatgacgcacaatcccactatccttcgcaagaccttcctctatataaggaagttcatttcatttggagaggacacgctgaaatcaccagtctctctctacaaatctatctctctcgagatgattgaacaagatggattgcacgcaggttctccggccgcttgggtggagaggctattcggctatgactgggcacaacagacaatcggctgctctgatgccgccgtgttccggctgtcagcgcaggggaggccggttctttttgtcaagaccgacctgtccggtgccctgaatgaacttcaagacgaggcagcgcggctatcgtggctggccacgacgggcgttccttgcgcagctgtgctcgacgttgtcactgaagcgggaagggactggctgctattgggcgaagtgccggggcaggatctcctgtcatctcaccttgctcctgccgagaaagtatccatcatggctgatgcaatgcggcggctgcatacgcttgatccggctacctgcccattcgaccaccaagcgaaacatcgcatcgagcgagcacgtactcggatggaagccggtcttgtcgatcaggatgatctggacgaagagcatcaggggctcgcgccagccgaactgttcgccaggctcaaggcgcgcatgcccgacggcgaggatctcgtcgtgactcatggcgatgcctgcttgccgaatatcatggtggaaaatggccgcttttctggattcatcgactgtggccggctgggtgtggcggaccgctatcaggacatagcgttggctacccgtgatattgctgaagagcttggcggcgaatgggctgacc

SEQ ID NO: 124 - DNA, 137 bp, Artificial Sequence
  linker sequence
atttaaatgcggccgcgaattcgtcgattgaggacgtccctactagacctgctggacctcctcctgctacttactacgattctctcgctgtgcatatggtcagtcatgcccgggcctgcaggcggccgcatttaaat

SEQ ID NO: 125 - DNA, 434 bp, Artificial Sequence
  hpRNAi
gtgagcaatgaaccaagatttatcaataccgttacttttgatagcaaagagggttctcctactcttgttatggtccacggatatggtgcctctcagggtttcttctttcggaatttttatgcccttgcgaggcatttcaaagttattgctattgatcagcttggctggggtggttcaagcaggcctgacttcacatgcagaagtacagaagagactgaagattggtttattgattcctttgaggagtggcgcaaagccaaaaaccttagcaactttattttgcttgggcactcctttggagggtatgtcgctgcaaaatatgctctcaagcatccagagcatgttcagcagttgattctggtaggaccagctggatttacatcagagactgaacatatgtccgagcggcttacccagtttagagcaacatggaa

SEQ ID NO: 126 - DNA, 593 bp, Artificial Sequence
  hpRNAi
actgctgatgctgtcaggcagtatctatggttgtttgaggagcataatgttcttgaattcctcgtacttgctggagatcatctatatcgaatggattatgaaaagttcattcaagcccacagagaaacagatgctgatattactgttgccgcactgccaatggatgaaaagcgagccactgcatttggtctcatgaagattgacgaagaaggacgcattattgaatttgcagagaaaccgaaaggagagcaattgaaagcaatgaaagtggatactaccattttaggtcttgatgatgagagagctaaagagatgccttttatcgcaagtatgggtatatatgtcattagcaaagatgtgatgttaaacttacttcgtgataagttccctggtgccaatgattttggcagtgaagttattcctggtgcaacttcgcttgggatgagagtgcaagcttatttatatgatggatactgggaagatattggtaccatcgaagctttctacaatgccaatttgggcattaccaaaaagccagtcccagattttagcttctatgaccgatcagctccaatctacacccaacctcgata

SEQ ID NO: 127 - protein, 5 aa, Artificial Sequence
  lipase motif
  misc_feature (2)..(2): Xaa can be any naturally occurring amino acid
  misc_feature (4)..(4): Xaa can be any naturally occurring amino acid
GXSXG

SEQ ID NO: 128 - protein, 6 aa, Artificial Sequence
  acyltransferase motif
  X (2)..(5): any amino acid
HXXXXD

SEQ ID NO: 129 - protein, 7 aa, Artificial Sequence
  probable lipid binding motif
  X (2)..(4): any amino acid
VXXXHGF

SEQ ID NO: 130 - DNA, 1224 bp, Arabidopsis thaliana
atggcggaagaaatctcaaagacgaaggtgggatcttcttctactgcttcggtggctgattcatctgctgctgcgtcggctgcaacgaatgcggccaaatcaagatggaaaattttgtggcctaattcgctccggtggattcctacgtccaccgattacatcatcgccgccgagaaacgtcttctctccatcctcaagacgccttatgtacaagagcaagtcagtattggttcaggaccaccaggttctaaaatcaggtggtttaggtctacgagcaatgagtcacgttacatcaacactgttacatttgatgccaaggagggagctcctacactcgtcatggttcatggttatggtgcttctcaagggtttttcttccgtaattttgatgctcttgccagtcgatttagagtgatcgctattgatcaacttgggtggggtggttcaagtaggcctgattttacatgtagaagcacagaagaaactgaggcatggtttatcgactcctttgaggaatggcgtaaagcccagaatctcagtaactttattctattaggacattcttttggaggctatgttgctgctaaatacgcgcttaagcatcctgaacatgttcaacacttaattctggtgggatctgctgggttctcagcagaagcagatgccaaatcagaatggctcactaaatttagagcaacatggaaaggtgcagtcctaaatcatttatgggagtcaaatttcactcctcagaagctggttagaggattaggtccttggggtccaggtcttgtaaatcggtatacaactgcaagatttggtgcacattcggagggaactgggctaacagaagaggaagccaaattgctaaccgattatgtgtaccatactttggctgcaaaggctagtggagagttatgcttgaaatacatcttctcatttggagcatttgctaggaagcccctcttacaaagtgcatcagagtggaaagtgccaacaacgtttatctatggaatgaatgattggatgaactatcaaggtgcggtggaagcgaggaaatccatgaaggtcccttgcgaaatcattcgggttccacagggtggtcattttgtgttcatagacaacccaattggttttcattctgcagtgctttatgcttgccgcaagtttatatctcaagactcctctcatgatcaacaactcctagatggtctacgattggtttag

SEQ ID NO: 131 - DNA, 1700 bp, Brachypodium distachyon
tccgcgcccgaaacgatcccaacagaagctctaatctccaaagccgccgcgcgtgttgagggtggtgcggggaaaagcttggtgtcgtgagcccccgtgtcgcatgcgccgcgctgccgccgtgacgaggatggcagcgaccgaggagatgaggcaggcgtccgccgccgccgccgccacggtgaccgaggcctcggcgtcggcggccccgcccgcggggtccaggtgggcgcgggtgtggccggccgcgctgcgctggatccccacctccaccgagcgcatcatcgccgccgagaagcgcctcctctccgtactcaaaactgggtatgtccaagaacaagttaacattggctcggctccacccgggtcaaaagtaagatggtttagatcatcaagtgatgagccaaggttcatcaatacagtgacatttgatagcaaggagaatgctcccactcttgtcatggtccatggttatggtgcttcacagggtttcttctttagaaattttgatgcccttgcaagccgtttccgagtgattgccattgatcagcttggttggggtggatcaagtagacctgacttcacctgtaaaagtaccgaagaaactgaggcttggttcatagattctttagaggaatggcgtaaagcaaagaacctcagtaattttatattgctcggtcattctttcggaggatatgttgcagcaaaatatgccttgcagcatcctgaacacgtgcagcacttaattttggtcggttctgctgggttttcatcagaaacagatcatagctctgagtggttaaccaagtttcgagcaacatggaaaggcatgctagtgaaccaactatgggagtccaattttactcctcaaagaattgtaagaggattgggtccttggggcccagatttggttcgcagatataccactgctaggtttggctcatattcaacaggtgaattactaacagaacatgagtccggcttgctgacagattacatttaccatacattagctgccaaagctagtggagagctgtgcttgaaatatattttttccttgggggcatttgcaaggaaacctcttctgcagagtgcatctgactggaaagtgccgaccactttcatatatggccatgacgattggatgaaataccagggggcacagcaagcacgcaaggatatgaaagttccttgcgaaatcatcagagtcccacagggaggacattttgtgttcatagataacccttccgggttccattcggcagtcttctatgcgtgccggaaatttttatctggagatgcagaggagggtctctctcttcctgatggcctgatatctgcatgacagcatgaggcgcgatgtcataccaattagcggtatgaacacaaagcaaagctatacggagctaggaaatgttacaaatgtcacgactcaccagaaatgttacaaatgtcaccactcaccagtttcctttttgtatgtatgaattgtgtgaatatacacgtcattcatatttgccggcgtatcagtacttcaatagtgataaaacatgatcatatatatatgtatgatttctctagtcggttctcatcaagtcaagttattgtgattggtgaatgatatactttccaggtcaactttgtgtttgcatgtacaaactatcatggaacatatcagtatagtttatgatttgtcttcc

SEQ ID NO: 132 - DNA, 1484 bp, Glycine max
gtcatggatgcgcgtcactgctcgcgttcattataatggcggaagagataaccaagaacgacgtcggagtaacctccaaaaccaccagaagcagctccaggttctggcctcgttggattcccacttccaccgatcacatcatcgctgccgagaagcgccttctttccgtcgtcaagactggttatgttcaagagcatgttaacattggctctggtcctcctggctccaaagtgaggtggttccgttcatccagcaacgagccgcggtttattaacaccgttacatttgacagtaaaccccattctccaacgcttgtcatgattcatggttatgctgcttcacaggggttcttttttcgcaattttgacgcgcttgcgtctcgatttagagtcattgctgttgatcaacttggatggggtggatcgagcagacctgatttcacatgcaaaagcactgaagaaactgaggcatggtttattgattcttttgaggaatggagaaaagccaaaaacttgagcaattttatactgctcggacattcttttggtggttatgttgctgccaaatatgcgctcaagcaccctgagcatgtacaacacttgattctggttggatctgctggattttcatctgaatcagatgcaaagtctgagtggataacaaggtttcgagcaacatggaagggggcagttttgaaccatctttgggaatcaaatttcacacctcagaaacttgtcaggggtttaggtccttggggtcccaacatagtccgcaagtatacaagtgctaggtttggtacacattcaactggggaaatactgactgaagaggaatcaacattgctgacagactatgtttaccacacattggcggccaaagctagtggagagctgtgcttaaaatatattttttcatttggagcatttgctaggatgccccttcttctcagtgcctcagagtggaaggtgcccaccactttcatgtatggtttccaagactggatgaattatcaaggtgcccaagaagctcgcaagcatatgaaggttccatgcgaaatcatcaggattcctcagggtgggcactttgcgttcattgacaacccaactgccttccattcagctgttttttatgcttgtcgaaggtttcttacacctgatccagacaatgaatctcttcctaaagggctaacctctgcataggttaggtcttaattttgtgctattcctgtctatatgtattttaatatttttttttactaattaaatttcataattgaatgaaatcatatgtatattgtttcagtaaagtggaatttactgaaaatatttgtaatagcaacttcaacaaaaatcgatttgtaggagaaatttcttccctggaaattgttctattttaaatcttgttgctcataagatattatgacttcattcaactaataattcatgtcgtttaggaaaagtagttagttatattaaatttgtcaa

SEQ ID NO: 133 - DNA, 1662 bp, Zea mays
accatacgggcggggccgcaccgaccgaacctaaccgagagcacgagcatacccgtcccgactccgactgcagagcatcagccgaggagaaaagtcgggagaaacgcgcgtgacgtctgcccgcgtcgtatgcgccgcgctgccgtcgccgcgacgacgacgacgaccaggatggcagccgaggagatgagacgggcctccgcctcaacggccacggcggagatgccggcgtcgccggcgccggcgcaagcggggtcgaggtgggcgcgggtgtggccgcgcgcgctccggtggatccccacctccacggaccgcatcatcgccgccgagaagcgactcctcacgatagtcaaaactggatatgtccaggaacgagtcaacattggctctgctccacctgggtcaaaagtaagatggtttaggtcagcaagtgatgaaccaaggttcattaatactgtaacatttgatagcaaggagaatgcccccaccctggttatggtccatggctatggagcttcacaggggttcttctttcgaaactttgatgcccttgcaagccgttttagggtgattgccattgatcagcttggctggggtggttcaagcagacctgacttcacatgtaaaagtaccgaagaaactgaggcatggttcatagattctttcgaggagtggcgcaaggccaagaacctcagtaattttatattgcttggtcactcttttggaggatatgttgctgcaaaatatgcgctaaagcaccctgaacacgttcaacagttgattttggttggtcctgctggcttctcatcagaaacagagcatagctctgagtggttaaccaagtttcgagcaacatggaaaggcatgctaatgaatcgtctttgggagtccaattttactccccaaagggttattaggggattgggtccttggggtccaggtctagtacagagatataccagtgccaggtttggtacaagttctactggtgaattactaacagatgaagaatcggcattgatgacagattatatgtaccatacgttagctgccaaagctagtggagagctgtgcttgaaatatatattttccttcggggcatttgcaaggaaacctcttctgcagtgcgcgtccgattggaaagtgccgactactttcatatatgggcagcaagattggatgaactaccaaggcgctcagcaagcacggaaggacatgaaagttccttgtgaaataatcagggtgccgcagggtggacattttgtgttcatagacaacccttcagggttccactcggctgtcttctatgcgtgccgtaatcttctatcagtaaatggagaggagggattcacatttcctgatggcctaatatctgcgtgaagtggcatgttcaacaagcttgctcaacaacagtttacataaagcaaagatatacgattgtggaaatcattgcccatttccaccaatttgcttgtatacggattatgctgtgtatatattacataacaaatgtattagtatcatttaatgcacgatttgtgaaagggcctgagtttgtatttagcgaattttaggttggtttttttccctttttcttctttcagtgcgcttgctagtcaatcccatactataagccgtgatcatttaaaaaaaaaaaaaaaa

SEQ ID NO: 134 - DNA, 1763 bp, Sorghum bicolor
actgcagatgcgcggtcgtcggctccggctcgcggaggcgagaacggcgaaccagcccgtgtctctgttccctttcttccctttaaaaacacggcaaaaaaaaagctagccggttacgctaccgaaccgaacggctcggcacgcgggcacgggcgcggggtcgcaccggaaaagcacgagcagagcagacctgacgtctccagactgcaggagcatcatcagtcgaggaggaggaagtgtgggggggggaaagggaaacgtgcgcgtcgtatgcgcctcgctgccgtcgccaggacgaccaggatggcagccgaggagatgaggcgggcctcggcctccgcggcggtcgcggccacgacggaggcggcgccggcgccggcgcaagcggggtccaggtgggcgcgggtgtggccgagcgcgctccggtggatccccacctccacggatcgcatcatcgccgcggagaagcggctcctctcgatagtcaaaactgggtatgtccaggaacaagtcaacattggctcagctccacctgggtcaaaagtaagatggtttaggtcagcgagtgatgaaccaaggttcattaatactgtaacatttgatggcaaggagaacgcccccaccctggttatggtccatggctatggagcttcacaggggttcttctttcgaaactttgacgcccttgcaagtcgttttagggtgattgccattgatcagcttggctggggtggttcaagcagacctgacttcacatgtaaaagtaccgaagaaactgaggcatggttcatagattcttttgaggagtggcgcaaggccaagaacctcagtaattttatattgcttggtcactcctttggaggatatgttgcggcaaagtatgccctaaagcaccctgaacacattcagcacttagttttggttggtcctgctggcttctcgtcagaaacagaccatagctctgagtggttaaccaagtttcgagcaacatggaaaggcatgctagtgaatcatctttgggagtccaattttactccccaaagagttattagaggattgggcccttggggtccaggtctagtacaaagatataccagtgccaggtttggtacacgttcaactggtgatatactaacagatcaagaatcaacattgttgacagattatatttaccataccttagctgccaaagctagtggagagctgtgcttgaaatatatattttccttcggggcatttgcaaggaaacctcttctgcagtgcgcatccgattggaaagtgccgactactttcatatatggtcaggaagattggatgaactaccaaggggctcagcaagcacggaaggacatgaaagttccttgtgaaataatcagggtgccacagagtggacattttgtgtttatagacaacccttcagggttccactcggctgtcttctacgcgtgccgtaatcttttatcccaaaatggggaggagggcttcacatttcctggtggcctaatatctgcatgaagtggcatgttcaacaatcttatcgtgcccaacaatagtttatatgaagcaaagatatacgatggtggaaatctttgctcatttccaccaatctggaaatatttgtgccctcttccaccaatttgtttgtatacggattatgccgtgtatatattctgtgttgactgtaagaaacataatgtattaacattatgtaatgtatgtacgattctttatttgattttcaacttgcaatacgcaagaaccac

SEQ ID NO: 135 - DNA, 1399 bp, Ricinus communis
cgcctttttaccagtcaatttccatttttatatataagtgcttttgcttaatttaagactaactacagcgacgaattcgcgtttatgaaattgcttcgcctacgactgctacgagtatctagctcctcaatatcatcaataatggcggaaggggctgctgccacatcagcatcagcatcagcgtcagcgtcagcgtcatgggcaaaaacaagatctctacggccatctgctctccgttggatcccaacttcaaccgatcacatcatcgccgccgaaaagcgtcttctctccctcgtcaagactccctatgttgtggaacaagtgaatatagggtctggcccaccggggtcgaaggtgaggtggtttcgttctaaaagcgacgaggcacggtttattaacacggttacttttgatagcaaagaggaggattctcctacactggttatggttcatggatatgctgcttctcaaggcttcttctttcgcaattttgatgctcttgcttctcgtttcaggctcattgctattgatcagctcggttggggtggatcaagtagacctgattttacgtgtaagagcactgaagaaactgaggcatggttcattgactcctttgaggcttggcgtaaagagaaaaacctcagtaacttcatcttacttggacattctttcggagggtatattgcagctaaatatgcactcaagcatcctgagcatgttcaacatctgattttagtgggatctgctggattttcatcagaatctgaagacaaatctgagcagcttactcggttcagagcaacatggaagggagcagttttgaatcatttatgggagtctaattttactcctcagaaggttattagaggtttaggtccttggggtccagatctcgtacgcaagtacacaactgctagatttggttcatattcaactggtgagatattaaaggaggaggagtccaaattgcttacagactatgtgtaccataccttagccgccaaagctagtggagagctatgcttgaaatatatattttcttttggagcatttgctcggatgccccttctacaaagcgcgtcacaatggaaagtgccaactactttcatatatgggatgcaagattggatgaattatcaaggggcccaaagagctcgcaaagatatgaatgtcccatgtgaaatcattagggttcctcagggcgggcacttcgttttcatagacaacccaactgggtttcattcagctgtgttatatgcctgccggagatttctctcacccgatcctgataatgaatctcttcctgaaggtctgatatctgcgtaggaagtgtggtttgtaattatttcttttttatttgttgtgtataatttatctgagaatttccaattctttcaat

SEQ ID NO: 136 - DNA, 1480 bp, Medicago truncatula
ggttggctcatagttccttttacctgttgaaaacaaaacatatggagtaacattttagtcagaaattcaaagctacgcacttgattaaactaattatcgaaaaatggcggaagaaattagacaaaaggacgacgtcgattcatcttcgaaatctaaaagcttctggtcttcactccgttggattcccacttctaccgatcatatcatcgccgctgagaaacgccttctttccattatcaagactgggtatgctcaagagcatgttaatataggttctggtcctcctggctctaaagttagatggttccgttcaaccagtaacgagccacgctttctcaacactgttacatttgatagtaaacccgattctcctacacttgttatggttcatggatacgctgcttctcagggtttcttctttcgcaattttgatgctctcgcctctcgtttcagaatcattgctgttgatcaacttggttggggaggatcaagcagacctgatttcacatgcaaaagtaccgaagaaactgaggcatggttcattgattctttcgaggaatggagaaaagccaaaaatcttaccaatttcatactgcttggacattcttttggtggttatgttgcttccaaatacgcgctcaagcaccctcagcacgtacaacacttaattttggtgggacctgccgggtttacagaagaaacagatccaaagactgagtttgttactaagtttcgagcaacatggaagggagcagttctgaaccatctatgggaatctaattttacacctcagaaaattgtcagaggtttaggtccttggggtcctaacatggtccgcaaatatacaagtgctaggtttggtacacattcaaccgggcaaaaactgattgacgaggaatcaagtctgctgactgattatgtttatcatacattggcggccaaagctagtggggagctgtgtttaaaatatatttttgcatttggagcatttgctaggatgccccttcttcaaagtgctcaagagtggaaggtgcccaccacattcatatatggttacgaagattggatgaattatgaaggtgcccaagaagctcgcaagcatatgaaggttccatgtgaaattatcagggtccctaaggccggccattttgtgttcattgacaacccaagtggcttccattcagctgtgttttatgcttgtcgaaggtttcttaccccaaattcggacaatgaatctcttcccgaagggctatcgtctgcttaggatttaattttgcatcaatccagtgtatattaatatggttattaatttttttttacttcataactgaatgaagccgtgtcttgtttctcagtgaagtggaatataatggaaatatatgtaattgtaataacaataatattgatttgttggggaactttgaggacaaaaacatattctggtaaaattttgttgcacatgcgacaaacatatgctgtg

SEQ ID NO: 137 - DNA, 1317 bp, Arabidopsis thaliana
gatctctctccctctctctctctctctctccgggaaaaatggataacttcttaccctttccctcttctaacgcaaactctgtccaagaactctctatggatcctaacaacaatcgctcgcacttcacaacagtccctacttatgatcatcatcaggctcagcctcatcacttcttgcctccgttttcatacccggtggagcagatggcggcggtgatgaatcctcagccggtttacttatcggagtgttatcctcagatcccggttacgcaaaccggaagtgaattcggttctctggttggtaatccttgtttgtggcaagagagaggtggttttcttgatccgcgtatgacgaagatggcaaggatcaacaggaaaaacgccatgatgagatcaagaaacaactctagccctaattctagtccaagtgagttggttgattcaaagagacagctgatgatgcttaacttgaaaaataacgtgcagatctccgacaagaaagatagctaccaacagtccacatttgataacaagaagcttagggttttgtgtgagaaggaattgaagaacagcgatgttgggtcactcgggaggatagttctaccaaagagagatgcagaagcaaatcttccgaagctatctgataaagaaggaatcgttgtacagatgagagatgttttctctatgcagtcttggtctttcaaatacaagttttggtccaataacaagagcagaatgtatgtcctcgagaacacaggagaatttgtgaagcaaaatggagctgagataggagactttttaacaatatacgaggacgaaagcaagaatctctacttcgccatgaatggaaattcgggaaaacaaaatgaaggaagagaaaatgagtcgagggaaaggaaccactacgaagaggcaatgcttgattacataccaagagacgaagaggaagcttccattgcaatgctcatcggaaatctaaacgatcactatcccatccctaacgatctcatggacctcaccactgaccttcagcaccatcaagccacgtcctcatcaatgccacctgaggatcacgcgtacgtgggttcatccgatgatcaggtgagctttaacgactttgagtggtggtgatatggtggtggaagttctcaagttcataaccccctttatgaaaatagaccttaagatatacaaaagagattaaaagaaaaaaaagttagtatatttcatcatatctctcattgaagatgagatttatatctataattgtttaatagtgtttttattacttttctatcaatatattaaagttttaatt

SEQ ID NO: 138 - DNA, 1439 bp, Medicago truncatula
tttcatccttacatattttgcatattgaaacacgtaggatggaataagattgataacaaaaattgcattgtttgcatattgaaaacatgggacaattgcatgggttcatgtgcttcattataagccacacattaggaaacacaggttgatattcaccactatttaacataagaatatctcatgtgtaagcattcatacaaatatcacaattgaattaaaaaccaaagaaatgtcttcctctaacttctcttgtatcctatccatctccttaacattcttcatcttgctactgaacaaggtgaattcagcagaaacaacttccttttccatcacaaaatttgtcccagatcaaaagaatctcatcttccaaggcgatgcgaaaactgcctcaacagggaagttagaactctccaaggcagtcaagaactctattggtagagctctttattccgcccctattcacatttgggatagcaaaaccggtagtgtggctaactttcaaactaccttcacctttacaataacggcgcctaatacttataatgttgcagacggtcttgcattcttcattgcaccaattgatactaagccgaaatcaattcatcatggaggataccttggagttttcgatagcaaaacttacaaaaaatcaattcaaactgttgcagttgaaattgacactttctataatgctcaatgggatccaaatcccggaaatataagtagcactggtcgacatattggaatcgatgtaaactctatcaaatcaataagcaccgtgccgtggagtttggaaaacaataaaaaggctaatgttgcgatagggtttaatggtgcaacaaatgtgttgagtgttgatgtggaatatcctttgattcgtcattataccctaagtcatgttgtgcctttgaaggatgttgttcctgagtgggtaaggattggtttctcttcttctactggagccgaatattcagcacatgatattttatcgtggtcttttgattcaaagttgaacctaggttttgagaacaatatcaatgccaatgtttcaagctctactcaagctgcatagttgaaaacttatccattatgtatgtgtgagtgtaaccaaccagtctaagaaaactataataagatacctgaaataatggttcattatcgtgtagtagaaatatggtcacaccatatcttcttttttttttaataaattatggaataatgctatttctcgcgagagttatgtttcggaaagattcatgaatagatgttaatcaattagatctatatatatatatatatatatatatatatatatatatatagcattttcttaaattatgcatatgtaatatcgtgtaatgctattgtttatatcaatgaatggtgttttgtagtcacataattcgtaatttctctccatgagaacagcgaaccaatta

SEQ ID NO: 139 - DNA, 1393 bp, Brassica napus
gagatgggtatccctataaggtgcagcatcgaaccatctgcaacattttgactcgttttcttttgtgtttttataacatctgtctcttcttcactcgatctccctctcttttctttttcaatctccccaacgaacctcccttcataactctctttctctccccgggaaatatggataacttcttgcccttttcctcttctaacgcaaactctgtccaagaactctccatggatcttaacaagaatcgctcgcacttctccatggcgcagcctcagcacttgttgccgccttactcgtacgttgcatgtccggcacttgatcagacggggaccatgaatcatcagcctcttcactcatcggatgcttttcctcagatcccggttgtacaaaccggaggtgaattcggctatttggtttgtaagcccggtgtgaggcaggaacgaggtggatttcttgatccacactccactaagatggctaggatcaacaggaagaaggcgatgctaagatcaagaaacaactctaaccctaattctagttcgaatgagttggttgattcaaggagacaagtggctcttaccatgaaaaataatgccgagattgctgctagaaaagatttttatcgattctcctcattcgataacaagaaacttagggttttgttggtgaagcacttgaagaacagcgatgttgggtcacttggaaggattgttctaccaaagagagaagcagaaggaaatcttccggagctatctgataaagaaggaatggtattagagatgagagatgttgactctgtgcagtcttggtctttcaaatacaagtactggtccaataacaagagcagaatgtatgtcctcgaaaacacaggagaatttgtgaagaaaaatggagtattgatgggagactatctaacaatctacgaggacgaaagcaagaatctctacttctccatcagaaagcacccacacaaacaaaatgatggaagagaggatgagtcgatggaagttatcgagatgaacttctatgaagatataatgtttgattacataccaaatgatgaagacgattccattgcaatgctcctcggaaatctaaacgagcactatccctacccaaatgatcttatggatctcactgtcaatcttgatcagcatcagcaagccacctcctcgtcgccacctgctgatcacatgagctcgaacgatttcttatggtgatgtgatggacgttgatatggattccctttgagatgatatacaagggatgaaaagaaaagagtatcatattcatatccatatttgtttgataaaatgtgtttgttcccaatctattatttatgaaaaacttatttgtgtttaactccagattaattaaatatttttcatttgac

SEQ ID NO: 140 - DNA, 1755 bp, Arabidopsis thaliana
atgaactcgatgaataactggttaggcttctctctctctcctcatgatcaaaatcatcaccgtacggatgttgactcctccaccaccagaaccgccgtagatgttgccggagggtactgttttgatctggccgctccctccgatgaatcttctgccgttcaaacatcttttctttctcctttcggtgtcaccctcgaagctttcaccagagacaataatagtcactcccgagattgggacatcaatggtggtgcatgcaataacattaacaataacgaacaaaatggaccaaagcttgagaatttcctcggccgcaccaccacgatttacaataccaacgagaccgttgtagatggaaatggcgattgtggaggaggagacggtggtggtggcggctcactaggcctttcgatgataaaaacatggctgagtaatcattcggttgctaatgctaatcatcaagacaatggtaacggtgcacgaggcttgtccctctctatgaattcatctactagtgatagcaacaactacaacaacaatgatgatgtcgtccaagagaagactattgttgatgtcgtagaaactacaccgaagaaaactattgagagttttggacaaaggacgtctatataccgcggtgttacaaggcatcggtggacaggtagatacgaggcacatttatgggacaatagttgcaaaagagaaggccagactcgcaaaggaagacaagtttatctgggaggttatgacaaagaagaaaaagcagctagggcttacgatttagccgcactaaagtattggggaaccaccactactactaacttccccttgagtgaatatgagaaagaggtagaagagatgaagcacatgacgaggcaagagtatgttgcctctctgcgcaggaaaagtagtggtttctctcgtggtgcatcgatttatcgaggagtaacaaggcatcaccaacatggaaggtggcaagctaggatcggaagagtcgccggtaacaaagacctctacttgggaactttcggcacacaggaagaggctgctgaggcttatgacattgcagccattaaattcagaggattaagcgcagtgactaacttcgacatgaacagatacaatgttaaagcaatcctcgagagcccgagtctacctattggtagttctgcgaaacgtctcaaggacgttaataatccggttccagctatgatgattagtaataacgtttcagagagtgcaaataatgttagcggttggcaaaacactgcgtttcagcatcatcagggaatggatttgagcttattgcagcaacagcaggagaggtacgttggttattacaatggaggaaacttgtctaccgagagtactagggtttgtttcaaacaagaggaggaacaacaacacttcttgagaaactcgccgagtcacatgactaatgttgatcatcatagctcgacctctgatgattctgttaccgtttgtggaaatgttgttagttatggtggttatcaaggattcgcaatccctgttggaacatcggttaattacgatccctttactgctgctgagattgcttacaacgcaagaaatcattattactatgctcagcatcagcaacaacagcagattcagcagtcgccgggaggagattttccggtggcgatttcgaataaccatagctctaacatgtactttcacggggaaggtggtggagaaggggctccaacgttttcagtttggaacgacacttag

SEQ ID NO: 141 - DNA, 2061 bp, Medicago truncatula
atgaacttgttaggtttctctctatctccacaagaacaacatccatcaacacaagatcaaacggtggcttcccgttttgggttcaaccctaatgaaatctcaggctctgatgttcaaggagatcactgctatgatctctcttctcacacaactcctcatcattcactcaacctttctcatcctttttccatttatgaagctttccacacaaataacaacattcacaccactcaagattggaaggagaactacaacaaccaaaacctactattgggaacatcatgcatgaaccaaaatgtgaacaacaacaaccaacaagcacaaccaaagctagaaaacttcctcggtggacactctttcaccgaccatcaagaatacggtggtagcaactcatactcttcattacacctcccacctcatcagccggaagcatcctgtggcggtggtgatggtagtacaagtaacaataactcaataggtttatctatgataaaaacatggctcagaaaccaaccaccaccaccagaaaacaacaacaataacaacaatgaaagtggtgcacgtgtgcagacactatcactttctatgagtactggctcacagtcaagttcatctgtgcctcttctcaatgcaaatgtgatgagtggtgagatttcctcatcggaaaacaaacaaccacccacaactgcagttgtacttgatagcaaccaaacaagtgtcgttgaaagtgctgtgcctagaaaatccgttgatacatttggacaaagaacttccatttaccgtggtgtaacaaggcatagatggacagggagatatgaagctcacctttgggataatagttgtagaagagaggggcagactcgcaaaggaaggcaagtttacttgggaggttatgacaaagaagaaaaagcagctagagcctatgatttggcagcactaaaatattggggaacaactactacaacaaattttccaattagccattatgaaaaagaagtggaagaaatgaagcatatgacaaggcaagagtacgttgcgtcattgagaaggaaaagtagtggtttttcacgaggtgcatccatttaccgaggagtaacaagacatcatcaacatggtagatggcaagctaggattggaagagttgcaggcaacaaagatctctacctaggaactttcagcactcaagaagaggcagcagaggcatatgatgtggcagcaataaaattcagaggactgagtgcagttacaaactttgacatgagcagatatgatgtcaaaaccatacttgagagcagcacattaccaattggtggtgctgcaaagcgtttaaaagacatggagcaagttgaattgaatcatgtgaatgttgatattagccatagaactgaacaagatcatagcatcatcaacaacacttcccatttaacagaacaagccatctatgcagcaacaaatgcatctaattggcatgcactttcattccaacatcaacaaccacatcatcattacaatgccaacaacatgcagttacagaattatccttatggaactcaaactcaaaagctttggtgcaaacaagaacaagattctgatgatcatagtacttatactactgctactgatattcatcaactacagttagggaataataataacaatactcacaatttctttggtttacaaaatatcatgagtatggattctgcttccatggataatagttctggatctaattctgttgtttatggtggtggagatcatggtggttatggaggaaatggtggatatatgattccaatggctattgcaaatgatggtaaccaaaatccaagaagcaacaacaattttggtgagagtgagattaaaggatttggttatgaaaatgtttttgggactactactgatccttatcatgcacaggcagcaaggaacttgtactatcagccacaacaattatctgttgatcaaggatcaaattgggttccaactgctattccaacacttgctccaaggactaccaatgtctctctatgtcctcctttcactttgttgcatgaatag

SEQ ID NO: 142 - protein, 363 aa, Arabidopsis thaliana
MDNFLPFPSSNANSVQELSMDPNNNRSHFTTVPTYDHHQAQPHHFLPPFSYPVEQMAAVMNPQPVYLSECYPQIPVTQTGSEFGSLVGNPCLWQERGGFLDPRMTKMARINRKNAMMRSRNNSSPNSSPSELVDSKRQLMMLNLKNNVQISDKKDSYQQSTFDNKKLRVLCEKELKNSDVGSLGRIVLPKRDAEANLPKLSDKEGIVVQMRDVFSMQSWSFKYKFWSNNKSRMYVLENTGEFVKQNGAEIGDFLTIYEDESKNLYFAMNGNSGKQNEGRENESRERNHYEEAMLDYIPRDEEEASIAMLIGNLNDHYPIPNDLMDLTTDLQHHQATSSSMPPEDHAYVGSSDDQVSFNDFEWW

SEQ ID NO: 143 - protein, 280 aa, Medicago truncatula
MSSSNFSCILSISLTFFILLLNKVNSAETTSFSITKFVPDQKNLIFQGDAKTASTGKLELSKAVKNSIGRALYSAPIHIWDSKTGSVANFQTTFTFTITAPNTYNVADGLAFFIAPIDTKPKSIHHGGYLGVFDSKTYKKSIQTVAVEIDTFYNAQWDPNPGNISSTGRHIGIDVNSIKSISTVPWSLENNKKANVAIGFNGATNVLSVDVEYPLIRHYTLSHVVPLKDVVPEWVRIGFSSSTGAEYSAHDILSWSFDSKLNLGFENNINANVSSSTQAA

SEQ ID NO: 144 - protein, 349 aa, Brassica napus
MDNFLPFSSSNANSVQELSMDLNKNRSHFSMAQPQHLLPPYSYVACPALDQTGTMNHQPLHSSDAFPQIPVVQTGGEFGYLVCKPGVRQERGGFLDPHSTKMARINRKKAMLRSRNNSNPNSSSNELVDSRRQVALTMKNNAEIAARKDFYRFSSFDNKKLRVLLVKHLKNSDVGSLGRIVLPKREAEGNLPELSDKEGMVLEMRDVDSVQSWSFKYKYWSNNKSRMYVLENTGEFVKKNGVLMGDYLTIYEDESKNLYFSIRKHPHKQNDGREDESMEVIEMNFYEDIMFDYIPNDEDDSIAMLLGNLNEHYPYPNDLMDLTVNLDQHQQATSSSPPADHMSSNDFLW

SEQ ID NO: 145 - protein, 584 aa, Arabidopsis thaliana
MNSMNNWLGFSLSPHDQNHHRTDVDSSTTRTAVDVAGGYCFDLAAPSDESSAVQTSFLSPFGVTLEAFTRDNNSHSRDWDINGGACNTLTNNEQNGPKLENFLGRTTTIYNTNETVVDGNGDCGGGDGGGGGSLGLSMIKTWLSNHSVANANHQDNGNGARGLSLSMNSSTSDSNNYNNNDDVVQEKTIVDVVETTPKKTIESFGQRTSIYRGVTRHRWTGRYEAHLWDNSCKREGQTRKGRQVYLGGYDKEEKAARAYDLAALKYWGPTTTTNFPLSEYEKEVEEMKHMTRQEYVASLRRKSSGFSRGASIYRGVTRHHQHGRWQARIGRVAGNKDLYLGTFGTQEEAAEAYDIAAIKFRGLSAVTNFDMNRYNVKAILESPSLPIGSSAKRLKDVNNPVPAMMISNNVSESANNVSGWQNTAFQHHQGMDLSLLQQQQERYVGYYNGGNLSTESTRVCFKQEEEQQHFLRNSPSHMTNVDHHSSTSDDSVTVCGNVVSYGGYQGFAIPVGTSVNYDPFTAAEIAYNARNHYYYAQHQQQQQIQQSPGGDFPVAISNNHSSNMYFHGEGGGEGAPTFSVWNDT

SEQ ID NO: 146 - protein, 686 aa, Medicago truncatula
MNLLGFSLSPQEQHPSTQDQTVASRFGFNPNEISGSDVQGDHCYDLSSHTTPHHSLNLSHPFSIYEAFHTNNNIHTTQDWKENYNNQNLLLGTSCMNQNVNNNNQQAQPKLENFLGGHSFTDHQEYGGSNSYSSLHLPPHQPEASCGGGDGSTSNNNSIGLSMIKTWLRNQPPPPENNNNNNNESGARVQTLSLSMSTGSQSSSSVPLLNANVMSGEISSSENKQPPTTAVVLDSNQTSVVESAVPRKSVDTFGQRTSIYRGVTRHRWTGRYEAHLWDNSCRREGQTRKGRQVYLGGYDKEEKAARAYDLAALKYWGTTTTTNFPISHYEKEVEEMKHMTRQEYVASLRRKSSGFSRGASIYRGVTRHHQHGRWQARIGRVAGNKDLYLGTFSTQEEAAEAYDVAAIKFRGLSAVTNFDMSRYDVKTILESSTLPIGGAAKRLKDMEQVELNHVNVDISHRTEQDHSIINNTSHLTEQAIYAATNASNWHALSFQHQQPHHHYNANNMQLQNYPYGTQTQKLWCKQEQDSDDHSTYTTATDIHQLQLGNNNNNTHNFFGLQNIMSMDSASMDNSSGSNSVVYGGGDHGGYGGNGGYMIPMAIANDGNQNPRSNNNFGESEIKGFGYENVFGTTTDPYHAQAARNLYYQPQQLSVDQGSNWVPTAIPTLAPRTTNVSLCPPFTLLHE

SEQ ID NO: 147 - DNA, 336 bp, Artificial Sequence
  inducible promoter
tcgatagttgtgatagttcccacttgtccgtccgcatcggcatccgcagctcgggatagttccgacctaggattggatgcatgcggaaccgcacgagggcggggcggaaattgacacaccactcctctccacgcaccgttcaagaggtacgcgtatagagccgtatagagcagagacggagcactttctggtactgtccgcacgggatgtccgcacggagagccacaaacgagcggggccccgtacgtgctctcctaccccaggatcgcatccccgcatagctgaacatctatataaagacccccaaggttctcagtctcaccaacatcatcaacc

SEQ ID NO: 148 - DNA, 2466 bp, Artificial Sequence
  inducer
atggccgacactagaagaaggcagaaccactcttgtgacccatgccgtaagggcaagagaagatgtgatgctccagagaaccgtaacgaggctaatgagaacggatgggtgtcatgctctaactgcaagaggtggaacaaggactgcaccttcaactggcttagctcccaaaggtctaaggctaagggtgctgctccaagagctaggactaagaaggctaggactgctactactacctccgagccttctacttccgctgctactattccaactcccgagtccgataatcacgatgctccaccagtgatcaactcccacgatgctttgccatcttggactcagggacttctttctcaccctggcgatctcttcgacttctcccattctgctattccagctaacgctgaggatgctgctaacgtgcaatctgatgctccattcccatgggatcttgctatcccaggcgatttctctatgggacagcaacttgagaagcccctctccccattgtctttccaggctgttcttcttccaccacactccccaaacactgatgatctcattcgtgagcttgaggaacagactaccgatccagattccgtgactgacactaactccgttcagcaagttgctcaggatggctctctttggtctgataggcagtctccactcctcccagaaaacagtttgtgcatggcttccgactctaccgctagaaggtatgctaggtccaccatgaccaagaacctcatgaggatctaccacgactccatggaaaacgccctttcttgctggcttactgagcacaactgcccatactccgaccagatttcttacctcccaccaaagcaaagggctgagtggggaccaaattggtctaacaggatgtgcattagggtgtgcaggctcgatagggtgtcaacttctcttagaggaagggctctctccgctgaagaagataaggctgctgctagggcacttcaccttgctattgtggctttcgcttctcagtggactcaacatgctcaaaggggagctggacttaacgtcccagctgatattgctgctgacgagcgttctattaggcgtaacgcttggaatgaggctaggcatgcacttcagcacactactggaatcccatccttcagggtgatcttcgccaacatcatcttcagcctcactcagtccgtgctcgatgatgatgagcaacatggaatgggagctaggctcgataagcttctcgagaatgatggtgctccagtgttcctcgagactgctaataggcagctctacaccttcaggcacaagttcgctaggatgcagagaaggggtaaggctttcaataggcttcctggtggatccgtggcttctactttcgctggaattttcgagactcccaccccctcatctgagtctccacaacttgatccagtggtggcttctgaggaacacaggtctactctgtctctcatgttctggctcgggatcatgttcgacactctgtctgctgctatgtaccagaggccacttgttgtgtccgatgaggactcccagatctcttctgcttctccaccaagaagaggtgccgagactcctattaaccttgattgctgggagccaccaaggcaggtcccatctaatcaagagaagtctgatgtgtggggcgacctgttccttaggacttctgattctttgcccgaccacgagtcccacactcaaatttctcaaccagctgctaggtggccatgcacttatgaacaagctgctgctgctctctcctctgctactcctgttaaggtgttgctttacaggcgtgtgactcagctccagactttgttgtataggggagcttctccagctaggcttgaggctgctattcagaggactctctacgtgtacaaccactggactgctaagtaccagccattcatgcaggattgcgttgccaaccatgagcttctcccatccaggatccagtcttggtacgtgatccttgatggacactggcaccttgctgctatgcttttggctgatgtgctcgagtccatcgacagggattcctactccgatatcaaccacatcgacctcgtgactaagctcaggcttgataacgctcttgctgtgtctgctctcgctaggtcatctcttagaggccaagaactcgatccaggcaaggcttctccaatgtacaggcacttccacgactcccttactgaggttgcattccttgttgagccatggactgtggtgctcatccactcatttgctaaggctgcttacatcctcctcgattgccttgatcttgatggtcagggaaacgctctcgctggataccttcaacttaggcagaactgcaactactgcatcagggctctccagttccttggccgtaagtctgatatggctgctctcgtggctaaggatcttgagaggggactcaacggaaaggtcgacagcttcctctaa

SEQ ID NO: 149 - protein, 208 aa, Arabidopsis thaliana
MTSSVIVAGAGDKNNGIVVQQQPPCVAREQDQYMPIANVIRIMRKTLPSHAKISDDAKETIQECVSEYISFVTGEANERCQREQRKTITAEDILWAMSKLGFDNYVDPLTVFINRYREIETDRGSALRGEPPSLRQTYGGNGIGFHGPSHGLPPPGPYGYGMLDQSMVMGGGRYYQNGSSGQDESSVGGGSSSSINGMPAFDHYGQYK

SEQ ID NO: 150 - protein, 236 aa, Arabidopsis lyrata
MERGAPFSHYQLPKSISELNLDQHSNPNPMTSSVVVADASDNNKGIVAQQQPPCMAREQDQYMPIANVIRIMRKILPSHAKISDDAKETIQECVSEYISFVTGEANERCQREQRKTITAEDILWAMSKLGFDNYVDPLTVFINRYREIETDRGSALREPPSLRQAYGGNGIGFHGPSHGLPPPGPYGYGMLDQSMVMGGGRYYQNGSSGQDESSAGGGSSSSINGMPAFDSYGQYK

SEQ ID NO: 151 - protein, 230 aa, Brassica napus
MERGAPLSHYQLPKSNSGLNLDQHNNSIPTMTGSISACDDKNKTILPQQQPSMPREQDQYMPIANVIRIMRKILPPHAKISDDAKETIQECVSEYISFVTGEANERCQREQRKTITAEDILWAMSKLGFDDYVGPLNVFINRYREFETDRGCSLRGESSFKPVYGGSGMGFHGPPPPGSYGYGMLDQSMVMGGGRYYHNGSGQDGSVSGGGGSSSSMNGMPVYDQYGQYK

SEQ ID NO: 152 - protein, 252 aa, Ricinus communis
MERGGRVHRYRRHAKQPTPTTSATASTSPGMSSVQTTICSNINLPSTLSLSNSTAAPQAPQQQQLQPSQCLVREQDQYMPIANVIRIMRRILPPHAKISDDAKETIQECVSEYISFITGEANDRCQREQRKTITAEDVLWAMGKLGFDDYVEPLTLFLNRYREMENERSTIRDPILKRSSVGVVDYGNLGMNPFMPTFPMIPPPQGYFDSNMLGGYYRDAPDGASGAASGSNLAASSAPNSLLHFDPFAQFK

SEQ ID NO: 153 - protein, 198 aa, Glycine max
MNMNMRQQQVASSDQNCSNHSAAGEENECTVREQDRFMPIANVIRIMRKILPPHAKISDDAKETIQECVSEYISFITGEANERCQREQRKTITAEDVLWAMSKLGFDDYIEPLTMYLHRYRELEGDRTSMRGEPLGKRTVEYATLATAFVPPPFHHHNGYFGAAMPMGTYVRETPPNAASSHHHHGISNAHEPNARSI

SEQ ID NO: 154 - protein, 240 aa, Medicago truncatula
METGGGFHGYRKLPTNTNSSAVAGTLKLSSVSEMNTRQQVGEQNNNGTEQDNECIVREQDRFMPIANVIRIMRKILPPHAKISDDAKETIQECVSEYISFITGEANERCQREQRKTITAEDVLWAMSKLGFDDYIEPLTMYLHRYRELEGDRTSMRVEPLGKRGMEYGNLGGFVPQFHIGHPNGGYYGNAAPTYMMRDGNNNNNNNNNAPNAANAAGGSSHSQALANAEANGHHHHHQYK

SEQ ID NO: 155 - protein, 278 aa, Zea mays
MDSSSFLPAAGAENGSAAGGANNGGAAQQHAAPAIREQDRLMPIANVIRIMRRVLPAHAKISDDAKETIQECVSEYISFITGEANERCQREQRKTITAEDVLWAMSRLGFDDYVEPLGAYLHRYREFEGDARGVGLVPGAAPSRGGDHHPHSMSPAAMLKSRGPVSGAAMLPHHHHHHDMQMHAAMYGGTAVPPPAGPPHHGGFLMPHPQGSSHYLPYAYEPTYGGEHAMAAYYGGAAYAPGNGGSGDGSGSGGGGGSASHTPQGSGGLEHPHPFAYK

SEQ ID NO: 156 - protein, 225 aa, Arachis hypogaea
METGGGFHGYRNLPTTTSGLKLSVSEMNMRAVENNTGSSNNNHTDDNECTVREQDRFMPIANVIRIMRKILPPHAKISDDAKETIQECVSEYISFITGEANERCQREQRKTITAEDVLWAMSKLGFDDYIEPLTMYLHRYRELEGDRTSMRGEPLGKRTVDYGTLGVAAASTFVPPFHIGHHHHHPHPSSYYGTPMGNYIRDAPNAGSSLQPPSLAHAEPNTQYK

SEQ ID NO: 157 - protein, 234 aa, Arabidopsis thaliana
MERGGFHGYRKLSVNNTTPSPPGLAANFLMAEGSMRPPEFNQPNKTSNGGEEECTVREQDRFMPIANVIRIMRRILPAHAKISDDSKETIQECVSEYISFITGEANERCQREQRKTITAEDVLWAMSKLGFDDYIEPLTLYLHRYRELEGERGVSCSAGSVSMTNGLVVKRPNGTMTEYGAYGPVPGIHMAQYHYRHQNGFVFSGNEPNSKMSGSSSGASGARVEVFPTQQHKY

SEQ ID NO: 158 - protein, 231 aa, Brassica napus
MERGGFHGYRKFSLNTTNPSEPARFLMAEGSMQLAEPNQTNKTANGGEEECVVREQDRFMPIANVIRIMRRILPAHAKISDDSKETIQECVSEYISFITGEANERCQREQRKTITAEDVLWAMSKLGFDDYIEPLTLYLHRYRELEGDRGVGYNAGSVGMTSGMVVKRPNGTMGEYGAYGVVPGMHMAPYHYRHQNGYAYSGNEPDSKMGGPSSAANGSRVELFPTQQHKY

SEQ ID NO: 159 - protein, 216 aa, Phaseolus coccineus
MESGGFHGYRKLPNTTSPGLKLSVSDMNNVNTSRQVAGDNNHTADESNECTVREQDRFMPIANVIRIMRKILPPHAKISGDAKETIQECVSEYISFITGEANERCQREQRKTITAEDVLWAMSKLGFDDYMEPLTMYLHRYRELEGDRTSMRGESLGKRTIEYAPMGVGVATAFVPPQFHPNGYYGPAMGAYVAPPNAASSHHHGMPNTEPNARSM

SEQ ID NO: 160 - protein, 312 aa, Arabidopsis thaliana
MVDENVETKASTLVASVDHGFGSGSGHDHHGLSASVPLLGVNWKKRRMPRQRRSSSSFNLLSFPPPMPPISHVPTPLPARKIDPRKLRFLFQKELKNSDVSSLRRMILPKKAAEAHLPALECKEGIPIRMEDLDGFHVWTFKYRYWPNNNSRMYVLENTGDFVNAHGLQLGDFIMVYQDLYSNNYVIQARKASEEEEVDVINLEEDDVYTNLTRIENTVVNDLLLQDFNHHNNNNNNNSNSNSNKCSYYYPVIDDVTTNTESFVYDTTALTSNDTPLDFLGGHTTTTNNYYSKFGTFDGLGSVENISLDDFY

SEQ ID NO: 161 - protein, 321 aa, Brassica napus
MMADENVETKASTLIASVGHQGHGFGSGSGGHHGLSASVPLLGVNSKKRRMPRQRRSSSSFNLLSLPPPMPLSPHVPTPLSARKIDPRKLRFLFQKELKNSDVSSLRRMILPKKAAEAHLPALECKEGIPIRMEDLDGLHVWTFKYRYWPNNNSRMYVLENTGDFVNAHGLQLGDFIMVYLDLDSNNYVIQARKASEEEEEEEDVTIIEEDDVYTNLTKIENTVVNDLLIQDFNHHNDNSSNNNSNNNINNNKCSYYYPVIDDITTNTASFVYDTTTLTSNDSPLDFLGGHTTTTTNTYYSKFGSFEGLGSVENISLDDFY

SEQ ID NO: 162 - protein, 314 aa, Medicago truncatula
MMMDEGEGKKKVVVQKTEACGFMAGVEDELGFVNVKGDNNNGSGQRIHHDHGFVAAAFGTVHRKKRMARQRRSSSSTITIHLKNLPSSTTTTTTTTTSHVPISPIPPLFHSLPPAREIDHRRLRFLFQKELKNSDVSSLRRMVLPKKAAEAFLPVLESKEGILLSMDDLDGLHVWSFKYRFWPNNNSRMYVLENTGDFVSTHGLRFGDSIMVYQDNQNHNYVIQAKKACDQDEYMEEANDTINHIFVDDYEVNKSCFDVAYPAMNDTSMSFIYDTTISNDSPLDFLGGSMTNYSRIGSVETFGSVENLSLDDFY

SEQ ID NO: 163 - DNA, 3275 bp, Arabidopsis thaliana
ggttggctatatggtccaaattttgatttgcaatatgagattgcacagagagaacaatctttcattatgattaattattgtacaagtaacaaacaccaatctccgatatactttggctctttagcacattgttatgctagaagttagcggaaatctatatgttgttaaacgcagcgtttaaattgaacagtgtaatttaccttgaaattttaagactacatgctgtttagaatttcagatgaaaacatcttgatgttttagaaatccacgtgggaatagcgtaaaatcttatccaacgaacttattttggttttgttgtatttgtgcaagtcgtcacgctaatcgaaaaaagaaaagaaaaaaagaagccgtcatgatcggccatttctcggccgagtctgagtctgactctgcgtccgtgtcaccattatcagatcgagcctgtcttatctcgttgcgattccctatgcaaaaatcttcttcttttttttattcccccatttatctctgatctcttctctcttctcaagtaaacctctctgcttcacgtctcttcttttcttgtcgattttccccagataatcagttgaaaacacacccaaattcatcttcgaatcaataatggatataagtaatgaggctagtgtcgatcccttttcgattggaccatcatctatcatgggtcgaaccattgctttcagagtcttgttctgtagatcaatgtcacagcttaggcgtgatctctttcggttcttgttgcattggtttcttagatttaagctgaccgtttcaccgtttgtgtcgtggtttcatcctcggaaccctcaagggattttagcggtggttacaatcattgcctttgtgttgaaacgatacacgaatgtgaaaataaaggcggaaatggcttaccggaggaagttttggaggaatatgatgcggacggctttgacttatgaggaatgggctcatgctgctaagatgttagagaaggaaacaccaaagatgaatgaatctgatctttatgatgaagagttggttaagaacaagcttcaggagcttcgtcatcgtcgccaagaaggctcacttagagacattatgttttgtatgagagctgatttggtgaggaatctcggtaatatgtgtaattcggagcttcataaaggtagacttcaggttcctagacatatcaaagagtacattgatgaggtgtctactcagttgagaatggtttgtaactctgattcagaggagctttctttagaagagaagctttcttttatgcatgaaacacggcatgcctttggtagaacggctttgcttttgagtggtggggcttctcttggtgcgtttcatgttggtgtggttaggactttggttgagcataagcttttacctcgaataattgctggttctagtgttggatccatcatttgtgctgttgtggcctcaaggtcttggccagaactacagagtttctttgagaattctttgcattctttacagttctttgatcagctcggaggcgtgttctcaatagtgaaacgggtaatgacacaaggggctctacacgatatcagacagttgcaatgtatgcttagaaacctcacaagcaatctcacattccaagaagcttatgacatgacaggaaggattctcgggatcaccgtttgctccccaagaaagcatgaacctcctcggtgtcttaactatttgacttcgcctcatgtggttatatggagcgcagtgactgcttcttgtgcttttcctggtctctttgaagctcaagagctaatggctaaagatcgaagtggagagatcgtaccgtatcatccacctttcaatttggatccagaagtaggcactaaatcatcatctggacgccggtggagagatggtagtttggaggttgatttaccaatgatgcagcttaaagaactgttcaatgtcaatcattttattgtgagccaagccaatcctcacattgctccattactgcgtctaaaggatttagttcgagcttatggtggtagattcgcagctaagctcgcgcatctagtggagatggaggtcaaacatagatgcaaccaggtattagagctcggttttcctctcggtggactcgcaaagctttttgctcaggagtgggaaggtgatgttacagttgtaatgcctgctactcttgctcagtactcgaagattatacaaaatccgactcatgtcgagcttcagaaagcggctaaccaaggaagaagatgcacttgggagaagctctcagccataaaatcaaactgcgggatcgagcttgcgcttgatgattctgtagctattcttaaccatatgcggaggctcaagaaaagtgcggagagagccgccactgccacgtcttcgtctcatcacggattggcttcaaccaccagattcaatgcttcaagaagaatcccatcttggaacgtccttgccagagagaactcaacaggctcactggatgatctagtcactgacaataacctccacgcttcttcgggcaggaatttaagcgacagtgaaacagagagcgtggagttgagttcttggacaagaactggtggacctttaatgagaacagcttctgctaataagttcattgattttgttcagagtcttgatatcgacattgcattggtcagaggatttagtagcagtcccaattctccagcagttcctcctggtggctcgtttactccaagcccgagatccatagcggctcattcggatatcgaatcaaacagcaatagcaacaatcttggaacaagcacttcaagcataacagttactgaaggtgatcttctacagcctgagagaacgagtaacggatttgtgttaaacgtcgttaaaagagagaacttgggaatgccatcgattgggaaccaaaatacagagttaccagagagtgtacagctcgatataccggagaaggagatggattgtagctctgtatcagaacacgaagaagatgataacgacaatgaagaagaacataacggctcgagtctggttactgtttcttcagaagattccggtttacaagaaccggtgtctggtagtgttatagatgcttagagtgtgattgattcaagtgagtatagattcttaattaaatttgcagagtttccaaagggtttagtgcaccacttgtgtatgtttgtattgcttattgtttgaaattcatttgtgaaatcgaaatatatctgtaaattcagaaaatattctctcatccattacaaaatatttgagtc

SEQ ID NO: 164 - DNA, 2795 bp, Brassica napus
tcccacgctcaggttctaattgcaaaaaaggatcatactttccttattaaaatcaatttcctgtgcttgatttctatcttaggaagctcgtagtagtttctctgatagtgaatttgatgaaacaaagaaaaaaatgctgacttggtctcagattctaattaaacacacacacacacataacctccaatggatataagcaacgaggccaatgtcgatcccttctcaatcggaccaacctccatcctcggccgaaccatcgccttcagagtcctcttctgcaaatcaatgctccagctccgccgcgacctcttccgcttcctcctccactggttcctcacactcaagctcgccgtctccccctttgtctcctggttccacccccggaacccccaggggatcctcgccgtcgtcacgatcatcgccttcgtcctgaaacgctacaccaacgtgaaggccaaggccgagatggcctaccgtagaaagttctggaggaacatgatgcgcgcggcgttgacttacgaggaatgggctcacgccgctaagatgttggataaagagactccgaagatgaacgagtccgatctttacgatgaagagttggttaagaacaagctaatggagcttcgtcatcgacgtcatgagggctctcttagagacattattttctgtatgagagctgatcttgtgagaaatctcggtaatatgtgtaaccctgagcttcacaagggaaggcttcacgtgccgagactcatcaaagagtatatcgatgaggtctctacacagcttaggatggtttgcgacatggacactgaagagctttctctggaggagaaactttcttttatgcatgagaccagacacgcgtatggaagaacagctctacttctcagtggaggagcttctcttggggctttccatcttggtgtggtcaagacgcttgtggaacataagctattgccaagaattatagctggttcaagcgtggggtctgtaatgtgtgcggttgtggggacaaggtcatggcccgagttgcagagcttctttgaagggtcctggcatgctctgcagttctttgatcagatgggaggaattttcactactgtgaagcgggttatgactcaaggcgcagtccatgagatccggcatctgcaatggaagttgaggaatctcaccaacaatctcacagtccggaatttccgggtcgacgacttcgaggatactcgggataacggtttgctcaccgacgaagcactagccgcctcggtgcttaactatctcacttctcctcacgtggtgatatggagcgcggtgactgcttcttgcgctttccctggtttgtttgaagctcaggagctgatggctaaagataggagtggggagatagtgccgtatcatccgccttttaatttggaaccggaggaaggtggggataagtcgtctacgaggaggtggagagatgggagtttggaggttgatttgccgatgatgcagcttaaggagctgtttaatgttaatcattttattgtgagccaggctaatcctcacattgctccgttgctgcgtttgaaggatatagttagagcttatggaggtcgatttgcagcaaagctcgcgcaactcgcggagatggaagtgaagcatagatgtaatcaagtactagaactcgggcttcctctaagagaagtagcttcactatttgctcaagaatgggaaggcgatgtcacaattgtcatgccagctactttttctcagtacttgaagatcatacaagtcgacgatttcgtcgagcttcaaaaagccgctaaccaaggaaggagatgcacttgggagaagctatcagccataaaagcaaactgtgggatcgagcttgcgcttgatgagtgtgtaactaatcttaaccatatgcgtaggctcaacagaagcgctgagagagccgctgctgctgctggcacgtcctcctcgtctcatcacggattagcttcaacgacaagattcaatgcttctagaagaatcccgtcttggaacgtcatcgctagagagaactcaactggctcactggacgacctcgtcactgacagtaacaataataatctccacgcggggaggaacctaagcgacagcgaaacggagagcgtggagatgagttcttggacgaggactggtggaccgttgatgagaacagcttctgctaataggttcactgactttgtccatggtcttgacgtggacattgcgttgacaagagggtttactagcagccctaactctccagcggttcctggcccggttagtccgagttttagtccaagatcgagatccttggcggctcaatccgagagcgaatctgacaagagggaaagtagcaacagttctagtatatcagctactgaaggtgatcttctgcagcctgagagaacgagtaacggttttgttttgaacgttgttagaagagagaacttggggatgcctgtggagaaccagagcggtgagctgccggagagtgtacagatagatatacctgagagggagatggataatagctctgtctcaggacatgaagatgataatgatgataatgatgatgaagaagaagaacataagggctcggttccggttaaagattccggtttacaagattcttgtagtgtaatagatgcttagactgatttgatccgagtgaagagattcttgttcagcaaagatcttggagtgttttagtgctttgtaaatagtacaactataggccgcaagtaaggtgcatgttgtgtatgtttgcagtgattatgttgaaaatt

SEQ ID NO: 165 - DNA, 2670 bp, Brachypodium distachyon
atggaagaatccggagaagcgagtattggggccttcaggatcgggccgtcgacgcttctcggccgcggcgtcgcgcttcgcgtgctcctgttcagctcgctctggcgtctccgggcgcgggcgcgcgccgctgtgtcgcgcgtgcgcagggccacgctgccaatggccgcgtcctggcttcacctcaggaacacccatggcgtcctcctgattctcgtgctcttcgggttgctcctcaggaagctctccggtgcgcggtcgcggctggcgctggcgcgccggcgtaggctgtgcaagagcgcgatgcgctacgcggcgacgtatgagcagtgggtgcgtgccgccaaggtgctcgacagaatgtctgagcaggtgaacgagtctgatttttacgacgaggagctgatcaagagtaggcttgaggagctccggaggcggagggaggaagggtcgctccgggatgtggtgttctgtatgcgcggcgatctcgtgaggaacttggggaacatgtgtaatcctgagcttcataagggcaggctcgaggtgcccaggctgataaaagatttcattgatgaggtttcaactcagctgaaaatggtgtgtgaatctgacaccgatgcgttatttttggaagagaagcttgcctttgttcaggaaaccaggcatgcctatgggaggacagcactactcttaagtgggggcgcttcactgggctctttccatgtaggtgtagtgaaaacattagttgagcataagcttctgcctcggataatagcagggtctagcgttggttccattatatgttcaattgttgctactcgaacatggcctgagattgagagcttcttcatagactcattacaaatcttacagttcttcggtaggataggtggaatttttgctgtgaccaaacgggttatgacttatggtgcacttcatgacattagccagatgcaaaggcttttgagggatctcacaagtaacttaacatttcaagaggcttacgatataactggccgtgttcttggggtcactgtttgctctcccagaaaaaacgagccacctcgctgcctcaactacctgacatcaccacatgttgttatctggagtgctgtaactgcttcgtgtgcattccctggcctctttgaagctcaggaattgatggcaaaggataggtttggccacatagttcccttccatgcgcccttttccacagatccagaacaaggtcctggagcatcaaagcggcgatggagggacggaagtttggagatggatttaccgatgatgcaactaaaggagttattcaatgtgaatcatttcatcgtcagccaagctaatcctcacatctctccactcctccgaatgaaggagattgtcagatcctatggaggtcgctttgcgggaaagctcgctcgtcttgctgagatggaggtgaagtatcgatgtaaccaagttctagaagttggcctcccactgggaggacttgcaaagttgtttgctcaggactgggagggtgatgtcactatggttatgccagcaacagtagctcagtacttgaagattatacaagatccaacatatgcagaactccaaatggctgccaatcagggtcaaagatgcacgtgggagaagctctcagcgatcagagcaaactgtgcaattgaacttgcattggatgaatccattgcggttctcaaccacaaacgaaggttaagaagaagcacaagggcagcagcttcttcccaggaatataccagcaatgttcgactcagaacaccaaggagggtaccctcatggagctgcatcagtcgagagaattcgtcaggatctctctcagaagatcactttgcggtcgctatttcatccagtcaccaaggtactatacgagttgatggcgcaccaaacatgcctcatcatgttcgtcacagttcacacgatggaagtgagagcgaatcagaaaccattgacttaaattcatggaccaggagtggtgggcctctaatgaggacttcatcagctgatcagttcatcagttttatccagaatctcgagattgaatctgagttcgatagggttcgtactacagaggatgacaatacaggtattttatcaggatctacattttcaaaagatccatacccaaacattagttctagagtcactacaccagatagatgcacagaagtttctgaaacagagtcgtgcaacgccggcaacacaagcatcactgtttctgaaggagatttgctacaacctgagaggactaccaccggaattctactcaattttgtcagaagagaagatctgcttggtcagcataacagtgatgctgacatgaccgaaagctccttagccgaagcatatgtggacacatcacatttggaatcttgtgatgccatctcagcctctgacagttctgaaggtaacaaagacgcagctgactcagagaatctcttggtttctcatgcagatttagtaacttcgcatcaatcttcagttgatgataacaaaggtggctagattttgaaagaattcttttagtggcttgctaagtcgatgctgtacaggaaaaactgtagtgtctccgtttcgtgagcactactgctggtagcatagtgaatattgtactttgtaccagatactaaataaatttgattgcttgccatt

SEQ ID NO: 166 - DNA, 3884 bp, Artificial Sequence
  Populus trichocarpa
gttttctttcccttatccgcctttgattgcaaaagtcaatgtcagagccatcaccccctccttgctcaatctttacgtaaccgtatgtatatccttatcttcttctaacatttcccaagactccgatcctgtatttattgtattcacttcacccttcttctctctttccttcccgaacgaaaacaaagtctcaatctttcattctctgtttgtctaaagtctgtacattcttcactttctcgagttgggtttctttcttgaatttggtttcttgggtttgattttgtttttcaagtggatattgctatttattgggtggtgatattgagacccttttgttagttttgtatattggtttttgaggtggatgtagtttttttaggggttttagggtttggttattgaaaactcatatggcaaggttggcttctggcaatctggatttataagattctgtttttcttgttgacacagtacaggatcaaaagggttggatttttgttacttgtcaatatcttcttattttgtgatagctagtccttttgcattaggattgcatatctttattctatctacttcattgtctctctatatattgccatcctatccggggagagacagattcaattgttttattgtccttctcattctcattagaatcaaagtcttgacatacaatcctttcacaattgtgaaatttgattccttagtgaccatctattgtagctgtttcatatttgtttcgttcaagctaattctgttgttagatttgagacaaaagaaggccccgcttccaattacagaccactttcttgttttggttttagctaagatatggatataagcaatgaggccagtgttgaccctttcaaaatcggaccttcatcgatcattggtaggacaattgctttcagagttctgttctgtaaatcaatctcacatttgaggcaaaaaatctttcatgtgttgttgaattacatttatagagttggtgaatttgtggcgcctatgttatcatggtttcatccaaggaatccacaagggatattggccatgatgacgataattgcatttttattgaaaagatatgcgaatgttaaattgagggccgaaacagcgtataggaggaaattttggaggaatacgatgagaactgcgttgacatacgaggagtggtttcatgctgctaaaatgcttgataaagagaccccaaagatgcatgaatgtgatctctatgatgaagaactagtcaggaacaagcttcaagagctccaccaccgtcgccaagagggatgtcttagagatataatcttttttatgagagccgatcttgtaagaaatctcggtaatatgtgtaaccctgagcttcacaagggtaggcttcaagtgcccaagctcataaaggaatatattgacgaggtctcaactcagttaagaatggtttgtgactccgattcagaggagctttcgttggaagaaaagcttgctttcatgcatgaaacgagacatgcttttgggagaacagctttgcttctgagtggaggtgcttcacttggagcgtttcatgtgggtgtggttaaaacactggtggagcacaagcttatgccccgaataattgctggttctagtgtggggtcaattatgtgttcagttgttgccaccagatcgtggccagagctgcaaagtttttttgaggattcctggcactcgtttcagttttttgaccaattgggtggaattttcacagttgtgaagagggtcatgagacaaggagctgttcatgaaatccggcagttgcaatggatgttaaggcatcttacaagtaatcttacatttcaagaagcttatgacatgactggtcgaattcttgggatcacagtttgctcacctaggaagcatgagccccctagatgccttaattaccttacttcccctcatgttgttatatggagtgcagtcactgcttcttgtgcttttcctggcctttttgaagcccaggaactaatggcaaaggacagaagtggggaacttgtgccttatcacccaccctttaatctggatcctgaagaaggatctgatgcacctatgcgtaggtggagggatggtagcctggagattgatttaccaatgatacaattgaaggaactattcaatgtcaatcattttattgtaagtcaagcgaatcctcacattgctccattgttgagactgaaggatatagtcagggcatatgggggtagctttgctgccaagcttgctcatctcgctgagatggaggtaaaacatagatgcaatcaggtattggaacttggttttccattaggtggacttgccaagctttttgctcaagaatgggaaggtgatgttactgttgttatgcctgccacactcgctcagtactcaaaaattattcaaaacccaaatcacttggagcttcaaaaggcatcaaaccaaggcagaaggtgcacatgggagaagctttctgccataaaagctaattgtggtattgagcttgctcttgatgagtgtgtttctgttctgaaccacatgcgtagactcaaaaggagtgctgagagagctgctgctgcttctcatggccaagcaagctctgcgagcacattgagatttagtgcttcaaaaagaattccttcttggaattgcatcgcaagagaaaactcaacaggctcacttgaagaagacttccttgctgatgttgcttcaacattccatcaaggagttggtgtggctggaggaacttctactggtaggaatttgagaacacaacgcaacctacatcatgatggaagtgatagtgaatctgaaagtgtagatttgaattcttggacaagatctggcgggcctttgatgaggactgcttctgcaaataagttcattgactttgtccaaagtctggatgttgattctgagctaaggaaaggcttcatggctcatcctaactcgcctggggctcagatgggaggcagggatccatataatcagatctcaagagtgacaaccccagatagaaattcagaaagtgagtttgatcagagagattttagcaatagaaattctactggtggttctagcattacagtcaccgaaggagattttttgcagcctgaaagaatccataacgggtttgtgctgaatattgtaaagaaagaagatttggcacatcccaataggatccatgatttggagaattacaatagtgaagttcctgaatgtgttcagcttgattgtcctgaaaaggacatggatgctagctcagaatcggactatgctgcagaggaagacgactcccctgcaacagattccttgcataaatcagcttccactcttgatcacacagatgattctgtcgttcatgacattcaggagaagcatgtcgtggatggttaactttgagtttcttctgcattactgtaccaaaatattgggtggagttgattcccgggttactgtcaatcaaaggtttccgactttccgtcacaactggagtatcatagacgagatttagaatctgtttattttttattttaaaaatatttttgaaaaaaattttgattttattttgattttatttttgttttaaattaatatttttttggtgtttttcatattattttgatatgttgatattaaaaataaatttttaatatcaattattcaatcagatatatttttaagtaaaacaagacagtttgaaaagtaatcggaacttttaaaaggttgctcttagtagtgaattataaaaaacaattgaaagcaatctggcagcgtcaggctattgctgttgtaaactaattttgtgcgcatactatgcaacaattgtaatccacatgcttagatttcagccaacgagatggaatttgaccctc

SEQ ID NO: 167 - DNA, 2490 bp, Medicago truncatula
atggatcgtataagtaatgaagccactgttgatctttttccaatcggtccttcaggaattcttgcccgaacaattgcattcagagtccttttctgcaaatccatttcacatttaaggtatcaattattcttaactttattcgattcgtttcatagatttagaaaattctggggacccattatatcatccttgcatccaaaaaaccctcaagggatattagccatcatcaccattctcgctttcttgttaaaacgttacagtaatgttaaagtaagagctgaattagcatacaggagaaaattttggagaaatatgatgagatcagctttgacttatgaggagtgggctcatgcagctaagatgcttgataaagagacgacattgaagacgatgaatgaatccgatttttacgatgtagaattggttaggaataaggttcaagagttacgacatcgtagacaagaggggtctcttagagatattatcttttgtatgagagctgatcttgttagaaatttaggtaatatgtgtaaccctcagcttcataaaggtaggcttcatgtgccgagacagattaaggagtatattgatgaggtggcgatgcagttgagaatggtttgtcattctgattccgaggagctttctttggaagaaaagcttgctttcatgcatgaaactagacacgcgtttgggaggacggctttgttgttgagtggtggtgcttctcttggagcttttcatgtcggtgtagttaaaaccttggtggaacataaacttatgccgaggataatttctggttcgagtgtaggatccattatgtgctctattgttgctactaggtcttggcctgagcttcaaagcttttttgaagattcgttgcactcgttacagttttttgatcaaatgggtgggatttttacgattgtcaagagggttacaacatttggtgcagttcatgagatcagacagttgcagattatgttgaggcatctaacgagcaatcttacatttcaagaagcttacgacatgacaggtcgagttcttgggattacagtttgctccccaaggaagcatgaaccgcctagatgtcttaactacttgacttcaccccatgttgttatatggagtgcagtcacagcttcttgtgcctttcctggtctttttgaggctcaggaattgatggcaaaggatagaagtggagagattgttccttaccatcctccatttaatttgggtcctgaagagggttcctcacaagtgcggcgttggagggatggtagcttggagatcgatctacctatgatgcagttgaaagaattgttcaatgtcaatcattttattgttagtcaggccaatcctcatattgcgccattattgagattaaaagaatttgtacgagcttatggaggtaattttgctgccaagctggctcatctggtagagatggaggttaaacatcgatgtaatcaaatactggaacttggttttccattaggtggacttgccaagctgtttgctcaggactgggaaggtgatgtgacagttgttatgcctgctactcttgctcagtactcaaaaattatccagaacccttcttatgtggagcttcagaaggcagctaaccaagggagaagatgcacttgggagaagctttcagccattaaagcaaattgtggaattgagcttgctcttgatgagtgtgttgcaattctcaatcatatgagaagactcaaaagaagtgccgagagagctgcttctgcttctcatggtctttctagtactgtcaaatttagtgcttcaaaaagaattccatcatggaatgtcattgcgcgagagaattctacaggatctcttgaagactttcttgcagacactgctgcttcatttcatcacggggttagtagttccagtggagccacgggtaaaaattccaagcaccaccgcagcatgcatgatgtaagtgacagtgaatccgaaagtgctgaattgaatacctggaccagatctggtggtcctttgatgagaactgcttcggcagatatgttcaccgactttgtccaaaacttagaagttgatactgaactaaacagaggaatgggaactaattttagccctcgtgattcccagtatcacagtcccagattaacaacaccggatagatgctccgagaactcagaacccgatcagagagaaaatggcaacaaggttgtcatgaatggatctagcataatggtaactgaaggtgatcttttgcagcctgagagaatccataatggaattgtgtttaatgttgtcaagaaagaagacttaacaccttcaagtaggagtcatgattatgatagtgaaattgctgagtgtctccaaattgaatgtccagggaaggagatggatgatgctgctagctcagcttcagaaaacggagatgacgattctgcaacagctaggcccctaactgaaacaccagactctaatcctacagataattcctga

SEQ ID NO: 168 - DNA, 2783 bp, Glycine max
atggatcatattagtaatgaggccagtgttgaccgttttccaattggtccttctggcattcttggtaggacaattgctttcagggttcttttttgcaagtctatctcacattttaggcaccacatatttattgtgttgttagatctcttctataggtttagggggggtttggcatcctttatatcatggttgcatcccaggaaccctcaagggatattggcaatgatgacaattgttgctttcttgttgaaacgatacacaaatgtgaaatcaagggctgaaatggcatataggaggaagttttggagaaacatgatgagaagtgctttgacctatgaggagtgggctcatgcagctaagatgcttgataaagagacaacaaagatgaatgaatcagacctttatgatgtggaattggtgaggaacaagcttcaagagctccgccaccgtcgacaagagggatctctcggagatataatgttttttatgcgtgccgatcttattagaaatttaggtaatatgtgtaaccctgaactacacaagggtaggcttcaggtgcctaaattaatcaaggagtacattgatgaagtaacgactcaattgagaatggtctgtgattctgattcagaggagctatcattggaagaaaagcttgctttcatgcatgaaactaggcatgcatttgggaggactgctttgctgttaagtgggggtgcctctcttggagcttctcatgtgggtgtagttaaaacactggtagaacataaactcatgcctaggataattgctggttcaagtgtgggatccattatgtgtgctgttgttgccactaggacttggcctgagctccagagcttttttgaggattcatggcactcattgcaattttttgatcaaatgggtgggatttttgcagttgttaagagagtcacaacattgggtgctgttcatgagatcagacagttgcaaatgatgttgaggcatctaacaagcaaccttacatttcaagaagcttatgacatgacaggcagaattcttgggattactgtttgttccccaaggaagcatgaaccgcctagatgtcttaactacttgacttcaccccatgtggttatatggagtgcagtaaccgcttcttgtgcctttcctggcctttttgaggctcaagaattgatggcaaaggatagaagtggagagattgttccttaccaccctccttttaacttaggccctgaagagggctccacaccagtgcgccgttggagggatggtagcttggagattgatttacctatgatgcagttgaaagaactattcaatgtcaatcattttatagttagtcaggccaaccctcatattgcaccactattgagattgaaagaatttgtgcggacttatgggggcaactttgctgccaagcttgctcatcttgtggagatggaggtgaaacataggtgtcatcaaatactggaacttggttttccattaggtggacttgctaaattgtttgctcaagactgggaaggtgatgtgactgttgttattcccgcaactcttgctcagtacaccaaaattatacagaacccttcttatggagagcttcaaaaggcagccaaccaagggagaagatgtacctgggagaaactttcagccataaaagcaaattgtggcattgagcttgctcttgatgagtgtgttgtgattctcaatcatatgagaagactaaagagaattgctgagagagctgcttctgcctctcatggtttgtccagcactgtcaggttcagtgcttcaaaaagaattccttcgtggaattgcattgcacgagagaattcgaccggctcccttgaggaccttactgatgttgcctcctcattgcatcaaggcatcggcagttccagcagagccaatggcaaaacttggaagacccaccgtggcatacatgatggaagtgacagtgactctgaaagtgttgatttgcattcttggacaagaactggcgggcctttgatgagaactacttcagcaaatatgttcgttgattttctccaaaacttagaggttgatacggatcctaataaaggcttagtgagtcacactatccataatgattttcagtatcatagccccaggctcacaacactagataggaactctgatagcacagaatctgagccaagggaaactggcaacagggttgtcaatgtgtccagcatacttgtgaccgaaggtgatcttctgcagcctgaaaggatccataatgggattgtgtttaatgttgtcaagaaagaagacttgtcacccttaagtagtagcagtcatggttttgaaaattacaacattgaagttgctgaatgtgtccaagatgagtgtccagggaaggagatagatgctgctagctctgcatctgaacacggagatgatgaagaatccatgccagccaggtccttaactgacatgccagattacaattccattgatcatcattcgggcacagattcgggtatggatcaaagcattgttgacagttagtgtcaagtatcagttcttttccagtgacattttaatattttgttcctattgccctccatattgtaaatagtactcattctagacttggagaggtctttattcatgattttgatgggaatagcccaccaatttggtttgctcataaatgtaacaaagataaagagtttgtatacataaattccacgacaacattgatatttcttggttaccacttctcagatgaatgaaatggagacatggttttcataatt

SEQ ID NO: 169 - DNA, 2724 bp, Sorghum bicolor
atggatgacatcgccagcgaggcgccggtgggggcgttcgccatcggcccgtccacggcgctgggccgcgccgtcgcgctccgggtgctgctctgcggctccgcggcgcgcctgcggcaccgcctggccgcggcgctccgcgccgcgctgcccgtcgcggcggcgtggctgcacccgcgcgacaacacgcgcgggatcctgctcgccgtctgcgccgtcgcgctcctgctgcggggccgacgcggcagggccgggctgcgggcgagggtgcagtccgcctaccgccgcaagttctggcggaacatgatgcgcgccgcgctcacctacgaggagtgggcgcacgcggcgcggatgctggagcgcgaggccgccccgcgccgcgccagcgacgccgacctctacgacgaggagctcgtccgcaataagctccgcgagctcaggcaccggcgccacgagggatcgctcagggacatcgtcttctgcatgcgcgcggacctgctcaggaacctcggcaatatgtgcaaccccgaactgcacaaagggaggctgcaggtgcctagactcataaaggaatacattgaggaagtatctactcaactgaaaatggtctgtgattctgattcagatgagttgcctcttgaagagaaactcgcatttatgcatgagacaaggcatgcctttggtagaacagccttgctgctaagtggaggtgcttcattgggatcctttcatgtgggtgttgttaaaaccttggtagagcataaacttttgccaaggataatttcaggatcaagtgttggctcgataatgtgttctatagtagcaacaagatcatggcctgagctggagagcttttttgaagagtggcattccctgaaattttttgatcagatgggtggaatctttcctgtggttaaaagaattttgacgcaaggcgctgttcatgatataaggcacttgcaggtgcttttgagaaaccttaccagcaatttgacatttcaagaagcttatgacatgactggtcggattcttgttgtcaccgtgtgttctccaaggaagcatgagccgcctcgatgcctaaactatttaacatcacctcatgttcttatctggagtgcagtaacagcttcctgtgcttttcctggactttttgaggcccaagaattgatggcaaaagatagatttggtcaaaccattcctttccatgctccattcttattaggcatagaagaacgaactgttgctccaacccgccgctggagagatgggagcttagaaagcgatttacccatgaagcaattgaaggaactattcaatgtgaatcatttcatagtaagccaagccaatcctcacatagctccgctgttgagactaaaggaaatcgtcagggcttatggaggcagcttcgctgccaagcttgctgaacttgctgagatggaagtcaaacataggtgtaatcaagttttggaacttggatttcctctaggaggattagctaaattatttgctcaagattgggaaggcgatgttacagttgttatgccagccactcttgcgcagtattccaagatgatacagaacccatcttatgctgagcttcagaaggctgcgaatcaaggtaggagatgcacttgggaaaagctatcagccatcagggcaaattgtgctattgagcttgcactggatgaatgtgttgccctcctgaaccacttgcgtaggctaaagaggagtgcagaaagagcatccgcatcgcaaggatatggtccagcaatcaggttctgcccatctaggaggattccatcctggaatctcatagcaagagaaaattcaactggttctcttgaagaagaaatgcttacatctcctcaaggacctggaggagttgctggaacatctaccagaaaccagtatcctcagagaagtgcacatgagagcagcgacagtgaatctgagagtattgatttacactcttggacaagaagtggtggccctcttatgaggacaacctcagccaataaattcatcagctttgttcagaatcttgagatcgacacagaatccagaacaattccatcgagggaagacataactgatcttgtgacaccaaatgctggtaccttggcagctcatgcagtgagtagagaagcaatcgataggagcttggacaattcagctttagatatccatgataccagtacccctagatcgacatttggcccttcaacaagtattgtggtttctgaaggtgacttgttgcagcctgaaaagattgaaaatggtattttgtttaatgttgtaaggagggatactctgctcgggtctagtagtggagttgagtctcaaggatctcctcgggaaccagatgttgaaacagtacagacggagtgccttgatggcgtgtctacttctgatgatgatgatgacaaggaactaaatgccattgatgatggaggaactagtcccatgagcagaaataatctacaacatcaggggtcctcactggaagaaaaattataccatccctcttccttaaattctgaagacgagacaaacacaaacaaaccagaagctgcatcgatttttgatatatgtacagatatgcatccggcatctattagcctacctgaagggtcttcagaaaagacagaactggaaacaacaaagattcctgatgacaattcagctgttatgaatgatgaagttgcctcaggtgctggtaactaa

SEQ ID NO: 170 - DNA, 2985 bp, Zea mays
cattctctctctctctctcccttttcaatttcgggggctttatttctctcctcccacgccttgcatcttcttgatgcgttgcgtcccgactcgaggcagacatcggaggcgcgccactgacttagctcgcgatttctagatccgcaaccctgcgctgctcaactccgattcttttagttcggattcgggtagcagcagggcttcggtggcgatgacttgattgatacgaattggggatttcttgctgtttgcgcctctcttcgtatcggcgctgaagggctcagctcgagattagaacaatttgggttttggggtcttttcttcttctactactgctggtcaagttcacagaaatcgctggctccgtggtccaatggacgagtccggggaagcgagcgtcggctccttcaggatcgggccgtcgacgctgctgggccgcggggtggcgttccgcgtgctcctcttcagctcgctgtggcgcctgcgggcgcgcgcgtacgcggccatctcgcgcgtgcgcagcgcggcgctgccggtggcggcgtcctggctgcacctcaggaacagccacggcgtcctcctcatggccgtgctcctcgccctcttcctgaggaaactctcggccgcgcggtcgcgggcggcgctcgcgcgccggcgcaggcagcacgagaaggccatgctgcatgccgggacgtacgaggtctgggcgcgcgccgccaaggtgctcgacaagatgtctgagcaggtccacgaggcggatttctacgacgaggagctcatcaggaataggctcgaggaactccggagacggagggaggacgggtcgctccgggacgtggtgttctgtatgcgcggcgatcttgttaggaacttggggaacatgtgcaaccctgaacttcacaagggcaggctagaggttcctaagcttataaaggagtacattgaagaggtttctactcaactaagaatggtgtgcgaatctgacactgacgagttgctgttggaagagaaacttgcctttgttcaggagaccaggcatgcctttgggaggacagcgctactcttaagtgggggtgcttcactcgggtctttccatgtaggtgtagtgaaaacattggttgagcataagcttctgcctcggattatagcaggatcaagcgttggttccatcatatgttcgatcgttgctacccgtacatggcctgagattgagagcttcttcacagactcattacagaccttgcagtttttcgacaggatgggcggaatttttgcagtgatgaggcgtgtcaccacttatggtgcactgcatgacattagccagatgcaaaggcttttgagggatctcacaagtaacttaacatttcaagaggcttatgacatgaccggccgtgttcttgggatcaccgtttgctctcctagaaaaaatgagccaccccgctgcctcaactacctgacggcaccacatgttgttatttggagtgcagtaaccgcctcttgtgcatttcctgggctctttgaagctcaggaactgatggcaaaggataggttcggcaacatcgttcccttccatgcaccctttgccacagatcctgaacaaggtcctggagcatcgaagcgcaggtggagagacgggagcttggagatggatttacccatgatgagacttaaggagttgtttaatgtaaaccatttcattgtgagccaaactaaccctcacatttctccactcctccggatgaaagagcttgttagagcctatggagggcgctttgctggaaagcttgctcgtcttgctgaaatggaggttaagtatcgatgcaaccaaatcctagagatcggtcttccaatgggaggacttgcaaaattgtttgcccaggattgggagggtgatgtgaccatggttatgccagcaacacttgctcagtacttgaagatcattcagaatccaacatacgcggagctccaaatggctgccaaccaaggccgcaggtgcacatgggagaagctctccgcaatcagagcgaactgcgccattgaacttgcacttgacgaatccatagcggttctaaaccacaaacggaggctaaaacgaagcatggagaggacggcggcggcttcgcagggtcactctaactatgtccgacccaagactccgaggaggataccgtcatggagccgcatcagtcgagagaactctttggagtctctctcggaagagatctctgcggttgctgcttcgtccatgcagcaaggcgctgctcttgttgtcggcgcaccaccaacgactctttctcagcatgttcggcgcagttctcatgacggaagtgagagtgagtcagaaaccattgaccttaattcctggaccaggagtggagggcctctaatgaggacagcgtccgccgacaggttcatcagtttcatccataacattgagattgacacagaattaagtaggccctgtgctgtggaaggtgatgctgcaggtattttgtcagaatctaccttcccaaacggtccacgaccgaacaatagctcaagtgttagtatgccaggtagatgcacagaaaattctgggaccgagtcgtgcaacactgtcaacaccagagcttctactcccacaagcatggctgttcgtgaaggagatttgctgccgcctgaaagcactactgataatgtcctacttaacattgtgaaaagagacgccctgcaggatggtgtaactgaattggcggaaagctcctgcgctgaaggatatgcggcaaactgtgacaccgtctcagggctagactgctgaaggtaacaagacgctcgctgctgacttgagcaatcaacaattagctgatgattagattcttcttgattttgatgatgaaaggtcatttatatgtagctcactacagcaacgcagtgtaggaaaattgtacctgctcgatttaaactttaaagagcatgccatgagtagctttgttaatgttaatattc

SEQ ID NO: 171 - DNA, 1998 bp, Physcomitrella patens
atgaattacttagacactgacgccgacgctgcgctagagcatttcggcattggacctctgactttggcgcaaagagttgtggcctttcgcgtcctattttgtcgttgggtgaaagagcttcgtgttgccctcgcaaagaggctgcagcggacacggagggtatggagacaggtgttctatatgtggtttgggtggttgaaccctcgaaatcccagcgtccttctgttagctgccgttgtagcaaccatgctcatgagaagagcgaaggcagggtctcagaaagcagagattgcgtacagacggaagttctggtccaatttaatgagggcagctttgacgtatgaggaatgggctcatgcggcgcggatgctagagaaggagcagaatcggaggaaagattcagacttgtacgatgaggatttggtgcgttcgaagctcaacgatcttcgattgcgtcgtttggagggtggtgtggaggacattcttttctgcattagggccgatttagtgcgtaatttgggtaacatgtgcaatcccgaactgcacaaaggccggctacaaactccccccctcatccaggaatacatcaacgaagtgagataccatcttcgagctgtgtgtgggagcgactcggacagcttcacacttgacgaaaaaattgcttttattcatgaaacccgccatggttttggtcgcactgcacttcttctgagtggtggagcagctcttggagcgtttcatcttggggttgttcgaacccttgtcgagcatcgtttacttccccgagtgattgccggtgccagtgtgggatctgtcatatgctcatttgctgcaactcgaacttggacagagctccagagctttttcgaagacaccatgccccccatgcactttttcgaaaacatggggagcatttttgctattgcgcacaggcttctgactcgaggtgctgtgcatgaaattggtatgctgcaaaggaaaatgagacagctcattggggatttgacctttcaggaagcttacgatctatctggccgcgtgcttggaatctctgtatgctcacctcggagactcgagcctccgagatgtttaaattatttaacttctccccatgtagtcatttggagcgcagtcactgcatcctgcgcattcccaggcctttttgaagcacaggagctgatggcgaaggatcgaactggtcaacttgtaccctatcattcgccacctcaggttggccccgaggacaaggacatggaaaaggggattgggaagcggcgatggcgagacggcagtctggaaagcgatttgccaatgatgcagttgaaggaactgtttaatgtgaatcatttcattgtcagccaggcgaatccgcatattacaccatttttgaggttcaaggattttgttcgtgcatatggaggagatttcgctggaaaattggcacacttagcggagatggaggttaagcaccggtgcaagcagatgatggagatgggctttgaggtgtttggattggctaagctcttcgcacaagattgggaaggagatgtcacgattgtgatgccggccacttttgcccagtttgccaagatcatcacgaacctgacagccacagatcttcgcaaggcagtgatgcaaggccgacgctgcacctgggcgaagctatcagccattcaggccaactgtggcatagaattgatgctagacgaatgtgtctctgaattaaaccgtcgtaggaaagccctgcgtgaaatagagcgcagcgcaatgcagagcagccatggtgggatgcgcgggttatcaggaacaaagcgtatcccatcctggaacatcatcgcccgagagaattcctgcggttcgctagatgaagagagtcttcacgaggtgcggatcccacatgatggtagcgacagcgacgataatctggaccaaaatcagctttcgtggacgagagcaggtggcccgctcatgcggaccgcatcagcagccaaattcgtg

SEQ ID NO: 172 - DNA, 3439 bp, Hordeum vulgare
gatcgcagttagtttggcttgtacgtcgcgttccccttccacccttatctccttctccggctgaccgggacgccgcatttgtcccatccacggcacggcacggcacgggcacgggagggagaagaagaagcccagctcgactcctcctccgcctcctcctttcctctgatcccctccgtttgcccattccccagatcccagcacgccatgcccgggcgcgcaggcgccaagccgcaccgcgcgcatttctcttccgccctgctccgatccaaggccgcggaggtgacccagtgagctctcccgccacgcccgtccgtccgccggttcatcggtcgcccatggacgtcatcaccaacgaggcgcgcgtgggggcgttcgcgatcggcccgtccacggcggcgggccgggcgctcgcgctgcgcgtgctcctctgcggctccctggcgcggctgcggcaccgcctcgccgccgcgctgcgcgccgcggcgcccctggcggcggcctggctgcacccgcgccacaacacgcgggggatcctgctggccgtctgcgccgtcgcgctcctgctgcgcggccgcgggggccgcgccggggtgcgcgcgcgcgtgcagtccgcctaccgccgcaagttctggcgcaacatgatgcgcgccgcgctcacctacgaggagtgggcgcacgccgcgcggatgctcgagcgagagacgccgcgccgcgccaccgacgccgacctctacgacgaggagctcgtgcgcaacaagctccgcgagctcaggcaccgtcgccaggagggctcgctcagggacatcgtcttctgcatgcgcgccgacctgctcaggaaccttggtaacatgtgcaaccccgagctccacaagttgaggctgcaggtgcctaaactcatcaaggaatacattgaggaggtatctactcaactgaaaatggtttgcaattctgattcagacgagttacctctcgaggagaaactggcatttatgcatgagacaaggcatgcctttggtagatctgccttactgctaagtggaggagcttcatttgggtctttccatgtaggtgttgtgaaaaccttggtagagcataagcttctacctaggattatttcaggatcaagcgttggcgcaataatgtgtgctattgtcgccacaaggtcatggccagaactggagagtttttttgaggagtggcattccttgaaattctttgaccaaatgggtgggatctttcctgtatttaaaagaattttgacgcatggggctgttcatgacattaggcacttgcagacgcaattgagaaatcttacaagcaacttaacatttcaagaggcatatgacatgactggccgggttctcgttgttaccgtgtgttctccaagaaaacatgagccacctcgatgcctgaactatttgacgtcacctcacgttctcatctggagtgcggtaactgcttcctgtgctttccctggactttttgaggcccaggagttgatggccaaagatagattcggagaaacagttccttttcatgctccattcttgttgggcgtggaggaacgagctgatgctgctacacggcgatggagagatgggagcttagaaagtgatttgcccatgaagcagttgaaggaattattcaacgtaaatcacttcatagtaagccaagccaatcctcacattgctccattactgagactaaaggagatcatcagggcttatggaggcagctttgctgcaaagcttgctgaacttgctgagatggaagttaagcataggttcaatcaagttctggaacttggatttccattaggaggaatagctaagttatttgctcaacattgggaaggtgatgtgacaattgttatgccagccactcttgctcagtattcgaagatcatacagaatccttcgtattctgagcttcagaaagcagcaagtcagggtaggcgatgcacttgggaaaagctctctgccatcagggcaaactgcgctattgagcttgcattagatgaatgtgttgccctcctgaaccacatgcgtaggctgaagagaagtgcagaaagagcagccgcttcacaaggatatggtgctacaattagactctgtccatctagaaggattccgtcatggaatctcatagcaagagaaaattcaactggttctctcgatgaggagatgctcacatctcccactgttacaagccatcaagcagttggagggactgctgggccatctaacagaaatcaccatctccaacatagtatacatgatagcagtgacagtgaatctgagagtatagacttgaactcatggacgagaagtggtggccctctcatgaggacagcctcggctaataaattcatcagctttgttcagaaccttgagattgacccagagttcagaacaatttcaccaaaggggagtgaaggtgatattttgacaccgaatagtaacttgtttgctggtcacccaattggtagagagccagttgataatcatccaaggcctgttactcctggtaggacctcaggcaatacaggttccgatcctcatgatactcctgttcctaggtctccatttggtctttccgcgagtatcatggtccctgaaggtgacttgctgcagcctgaaaagattgagaatggtattttattcaatgttgtccgaagggatactctcctagcgtctactagcggagttgaacctcatggatcttcacatgaggcagatgtggaaactgtaccgaccgagtgcctttatggtgcttcggatgacgacgacaacgtggaactgaatgccaatgatgaagcgctatctgatcgtggagatcagagatcttcagttgcaggaaatctagattcgtccgcttccatggactgtcaagctgaagcaagtactactcgatcagaagctccatctctctttgatatctgtgtggagattcctccagcaaccatgaccacagaaaatagtcggcctgacgagccttcttcagacataagactggagactgtaaagacagaatgccctgatgagaattctgctgctgggaatgctgaagttgactcagttcctgccagtaaagaatcttcctattggtctcagacatcagaaattggacagcagcatcaagtggatatgggatctgtgaactcctgtactgtttcattttcagaagatgatagacatgtgagccttatttcgaacgagaaaccggtcactacttccagtggcggagctgagagtatgacatctggaagaagtgaagctgactagcatagaacttgcctgttgaccgacctaatgtttttctgtgttgggacttggtagtttgaacaattcagcttgatctgatccatgctatgtgtgcaatttaaactcgtgtcacgatcaaactgaattgtgtctatatgtaggtgttgtaatcc

SEQ ID NO: 173 - DNA, 3470 bp, Nicotiana benthamiana
gttatctgatccaaacttctgactttttctattttccgaatccctatgttttttaataaatccatctctgccattgcagtgatatattcatttattgttatcaccttcttcatttattggtccctctgtgttttccatatattgaaggagaaaacattaactttatgcgattttgtagtttttctggttgattcctacaaccccttttgacattgatcttgtgggttacaaaaaacattgaatctttatgtcaaaatttgatctttgtatttcattttaaattgaaatttgatttttgggggtattaaggattcttttgtcggttgattttgtgccttttttgccaagttcttgtcggtctctgagctgaatttccataatttgacaaaaagaaaaggctaaagcagaaaggttgggagtttctttctttgactttcagaaactaaggtattttctttgatctaattcttgttaatatctggttcaatctgattccgttgaatcttgtgaatagcctttgtttccctattgtcagaaaattatttccttttcactttcctcgactctcagaagttagtacaatctttgttctgctaaatcttgtgaataacctttagcttagagttttaggtatctgtatattgggttctcttaacatttagcctagaagccttctctaggattagtcccccttttcattgagatggatataagtaatgaggctacaattgacttcttttccattggacctactacgatattgggtcgaacaatcgcctttagagtgttgttctgtaaatcaatttcacaattgaagcatcacctatttcatttcttgatatattacttgtacaaattcaagaatggtttgtcatactacttgacacccttgatctcgtggttgcaccctcgtaatccacaaggaatattggcattggtaacgcttctcgccttcttgttgaggcgatacacgaatgtaaaaatcaaggctgagatggcctataggaggaagttttggaggaatatgatgagatctgcattgacttatgaggagtgggctcatgctgccaagatgctagataaagagacccctaaaatgaatgaggcagatctttatgatgtagaattagttcgaaataaactccaagagcttcgacatcgtaggcaagagggttctatgagggatatcatattctgtatgagagctgaccttgttaggaatcttggtaatatgtgtaatccagaacttcacaagggaaggcttcatgtgcctagactgattaaggattatattgatgaggtttcaactcagttgagaatggtatgcgactctgattcggaggagcttctcttggaagagaagcttgctttcatgcatgaaacaagacatgcctttggtaggacagctttgcttttaagtggaggtgcttctttaggagctttccatgtgggcgtggtgaaaacacttgtagaacacaaactgatgccacggataattgctggttcaagtgtcggctcgattatgtgctccatagttgcaactcgatcttggcctgagctccagagttttttcgaggactcctggcactctttgcaatttttcgatcagttgggtgggatttttactattttcaggagggtcatgacccagggtgctgtacatgagatcagacagctgcaggtgctgttacgtaatctcacgaataatcttactttccaagaagcctatgacatgactggtagagttctggggattactgtttgctcgcctaggaaacatgaacctcctagatgcttgaactacttgacttcacctcatgttgttatatggagtgccgttaccgcttcttgtgcctttcctggtctcttcgaagctcaagaacttatggcaaaggatagaagtggagatcttgttccatatcacccaccatttcatttgggtcctgatgccacttctagtgcatctgctcgtcgttggagggatggtagcttggaggttgatttgccaatgatgcagctaaaggagctcttcaatgtcaatcactttattgtgagccaggcgaatccgcatattgctccactgctgaggatcaaagagtttgtaagagcttatggaggcaactttgctgccaagcttgctcaacttacggaaatggaggtgaagcacagatgcaatcaggtattagaacttggttttcccttgggaggattagcaaagctttttgctcaagaatgggagggtgatgtaactgttgtaatgcctgccactctagctcagtactcaaaaatcatacagaatccctcgactctggagctgcaaaaagcagcaaatcaaggaagaaggtgcacttgggaaaaactctcagccatgaaagcaaactgtggaattgagcttgcacttgatgaatgcgttgctatactgaatcacatgcgtagactgaaaaggagtgctgagagggcggctgctgcttcacatggcttggcaagcactgtcagatttaacacttccagaagaattccttcttggaactgcattgcacgagagaactcaacaggctcccttgaagattttcttgcggatgttgctgcttcacatcatcaaggaggcagtggttcgggggcgcatgttaaccgtagttggcgaacgcaccggaatgcacatgatggtagtgacagtgagccggaaaatgtggaccttaattcttggacaagatcgggtggtcctttgatgaggacaacatcagctgataagtttattgactttgtccagaacttggaaattggttcgcgattgaacaaaggattgactattgacctcaacaatattattcctcagatggcaagcagggaccatttctccccgagcccaagggtaacaacacctgatagaagttcagatacagaatttgatcaaagagattttagttacagggtccctgcgagtagttcaagcattatggtaggcgaaggtgaccttctgcagcctgaaaggactaacagcggtattgtcttcaatgtggtaaggaaaggagacttgaccccatcgaacagaagccttgattcagaaaataatagttccgtgcaggatgcagttgctgagtgcgtgcaacttgaaagtccagaaaaggagatggatattagctcagtatcggaggatggtgagaatgatgttgggcaaggaagtagggtaaatgaagttgattgtagtaaaaatcgttcatcaatcggtgatggcaacgataagcaagttattgatacttgagagtttagctttgattattctacacaggccattcgaattattttttatactcaaatggagcttctttcagagctaacacactcagaattggggttgtaaatagtgcaagtagcaaatctgtaataaatgtttagtgtagtcatcacccttctactagttcaaagtggctcagttcaattcaaattcagaacttcgataattcatgttt

SEQ ID NO: 174 - DNA, 713 bp, Nicotiana benthamiana
tgtatgagagctgaccttgttaggaatcttggtaatatgtgtaatccagaacttcacaagggaaggcttcatgtgcctagactgattaaggattatattgatgaggtttcaactcagttgagaatggtatgcgactctgattcggaggagcttctcttggaagagaagcttgctttcatgcatgaaacaagacatgcctttggtaggacagctttgcttttaagtggaggtgcttctttaggagctttccatgtgggcgtggtgaaaacacttgtagaacacaaactgatgccacggataattgctggttcaagtgtcggctcgattatgtgctccatagttgcaactcgatcttggcctgagctccagagttttttcgaggactcctggcactctttgcaatttttcgatcagttgggtgggatttttactattttcaggagggtcatgacccagggtgctgtacatgagatcagacagctgcaggtgctgttacgtaatctcacgaataatcttactttccaagaagcctatgacatgactggtagagttctggggattactgtttgctcgcctaggaaacatgaacctcctagatgcttgaactacttgacttcacctcatgttgttatatggagtgccgttaccgcttcttgtgcctttcctggtctcttcgaagctcaagaacttatggcaaaggatagaagtggaga

SEQ ID NO: 175 - DNA, 1500 bp, Arabidopsis thaliana
cgaaaaaagaagtagaatatatatatatatatatatatatatatatatatatatatattcgtgtggacatcataaatgcctaaatgataatagttgatttcgagttttattttcgttacttccaatcaaattctccttgcaccatatttatttttttactgtgagaacatatataagtatatattggaattacgtatccgagaggtttttgcatatttcgtttatttattttcgatatccacactactgtattattaaaaatttgaaaaattcaactagggcttttcatcttctctagaattattcgtttatttatgtcgatgtccacactattattaaaataaaacgagaggatatggttggatcatccaagtttcgtttatgactctttgttcatttacaaacgtttagttttccacttaagttttgaaaagagttaatttccaatatattcggcacagtttttcaagtgtattcatctgttttttttttttttggttggctatatggtccaaattttgatttgcaatatgagattgcacagagagaacaatctttcattatgattaattattgtacaagtaacaaacaccaatctccgatatactttggctctttagcacattgttatgctagaagttagcggaaatctatatgttgttaaacgcagcgtttaaattgaacagtgtaatttaccttgaaattttaagactacatgctgtttagaatttcagatgaaaacatcttgatgttttagaaatccacgtgggaatagcgtaaaatcttatccaacgaacttattttggttttgttgtatttgtgcaagtcgtcacgctaatcgaaaaaagaaaagaaaaaaagaagccgtcatgatcggccatttctcggccgagtctgagtctgactctgcgtccgtgtcaccattatcagatcgagcctgtcttatctcgttgcgattccctatgcaaaaatcttcttcttttttttattcccccatttatctctgatctcttctctcttctcaagtaaacctctctgcttcacgtctcttcttttcttgtcgattttccccagataatcaggtaaataaggctactttcttatttgatctggtggtctttgtgttgaaatctctgggttttctctgttgatttcaaagttctctctttttttttttgtttactgggtgctgtgaaaaatgatcttgtcaaagtctcctcttttcatcgaattgaaactctaattagaaaaaagatcataacttttattaaaaaaatgagtttgctttgcttaattttgcgaattgcttcatagattcattgattagcctatttggggtaacaaaaaaaagctgacacggtttcagattccaaaaatagatcatgactctgtttcttctctgcagaggttttaataaatatatgcttcttctcatgagttctcgttttttttgtcaccttcgcagttgaaaacacacccaaattcatcttcgaatcaata

SEQ ID NO: 176 - DNA, 2871 bp, Artificial Sequence
  Nucleotide sequence of the complement of the pSSU-Oleosin gene in the T-DNA of pJP3502.  In order (complementary sequences): Glycine max Lectin terminator 348nt, 3' exon 255nt, UBQ10 intron 304nt, 5' exon 213nt, SSU promoter
ggcccctagaatctaattattctattcagactaaattagtataagtatttttttaatcaataaataataattaataatttattagtaggagtgattgaatttataatatattttttttaatcatttaaagaatcttatatctttaaattgacaagagttttaaatggggagagtgttatcatatcacaagtaggattaatgtgttatagtttcacatgcattacgataagttgtgaaagataacattattatatataacaatgacaatcactagcgatcgagtagtgagagtcgtcttattacactttcttccttcgatctgtcacatggcggcggcccgcggccgcttcattactcgagccaggaggatggatcgatgctggtctgagaccctgctaccggttgctgactgaactgctcggcacggtccttcatttcacgggccttgctcgccaactttgtcttggccgactccaactgatccgctccgggtggatgtttccccgtcaggtaacggtagatccaggacagcacagacagagcggcaacaccaaatcccccgcttgccagaaaacccgctcccaacaggaagatggtgatgactgcagatcagaaaaactcagattaatcgacaaattcgatcgcacaaactagaaactaacaccagatctagatagaaatcacaaatcgaagagtaattattcgacaaaactcaaattatttgaacaaatcggatgatatctatgaaaccctaatcgagaattaagatgatatctaacgatcaaacccagaaaatcgtcttcgatctaagattaacagaatctaaaccaaagaacatatacgaaattgggatcgaacgaaaacaaaatcgaagattttgagagaataaggaacacagaaatttacctgcagggaccagtacaggcgagaagatcaccaggagaggtgtggcgattgtcagcgcaatgaccgttccagccagggtcaacccggataacaccaacaggctacctccggcagtaaccgcggtcgctgcctttacaacacgctgagcacgcggttgcagttgcaagtggggggcacgtgtttgttgctgctgcccgtagtgctctgccatggttttttttaacggagcaagcggccgctgttcttctttactctttgtgtgactgaggtttggtctagtgctttggtcatctatatataatgataacaacaatgagaacaagctttggagtgatcggagggtctaggatacatgagattcaagtggactaggatctacaccgttggattttgagtgtggatatgtgtgaggttaattttacttggtaacggccacaaaggcctaaggagaggtgttgagacccttatcggcttgaaccgctggaataatgccacgtggaagataattccatgaatcttatcgttatctatgagtgaaattgtgtgatggtggagtggtgcttgctcattttacttgcctggtggacttggccctttccttatggggaatttatattttacttactatagagctttcataccttttttttaccttggatttagttaatatataatggtatgattcatgaataaaaatgggaaatttttgaatttgtactgctaaatgcataagattaggtgaaactgtggaatatatatttttttcatttaaaagcaaaatttgccttttactagaattataaatatagaaaaatatataacattcaaataaaaatgaaaataagaactttcaaaaaacagaactatgtttaatgtgtaaagattagtcgcacatcaagtcatctgttacaatatgttacaacaagtcataagcccaacaaagttagcacgtctaaataaactaaagagtccacgaaaatattacaaatcataagcccaacaaagttattgatcaaaaaaaaaaaacgcccaacaaagctaaacaaagtccaaaaaaaacttctcaagtctccatcttcctttatgaacattgaaaactatacacaaaacaagtcagataaatctctttctgggcctgtcttcccaacctcctacatcacttccctatcggattgaatgttttacttgtaccttttccgttgcaatgatattgatagtatgtttgtgaaaactaatagggttaacaatcgaagtcatggaatatggatttggtccaagattttccgagagctttctagtagaaagcccatcaccagaaatttactagtaaaataaatcaccaattaggtttcttattatgtgccaaattcaatataattatagaggatatttcaaatgaaaacgtatgaatgttattagtaaatggtcaggtaagacattaaaaaaatcctacgtcagatattcaactttaaaaattcgatcagtgtggaattgtacaaaaatttgggatctactatatatatataatgctttacaacacttggatttttttttggaggctggaatttttaatctacatatttgttttggccatgcaccaactcattgtttagtgtaatactttgattttgtcaaatatatgtgttcgtgtatatttgtataagaatttctttgaccatatacacacacacatatatatatatatatatatattatatatcatgcacttttaattgaaaaaataatatatatatatatagtgcattttttctaacaaccatatatgttgcgattgatctgcaaaaatactgctagagtaatgaaaaatataatctattgctgaaattatctcagatgttaagattttcttaaagtaaattctttcaaattttagctaaaagtcttgtaataactaaagaataatacacaatctcgaccacggaaaaaaaacacataataaatttg

SEQ ID NO: 177 - DNA, 1578 bp, Arabidopsis thaliana
gtcacacacacataaacactccacacgctctgcttcgtccaatcaccaaacacgctttaatgactctcacgttttcctcctccgccgcaaccgttgccgttgctgctgcaaccgtaacctcctccgctagggttccggtttatccactcgcttcgtcgactcttcgtggattagtatctttcagattaaccgcgaagaagctgtttctgccgcctcttcgttctcgcggcggcgttagtgtgagagccatgtctgagcttgttcaggataaagaatcgtccgtcgcggcgagcattgctttcaatgaagccgccggtgagacgccgagtgagcttagtcattcccgtactttcttggatgcgcgaagtgaacaagatcttttatctggtatcaagaaggaagctgaagctggaaggttgccagcaaatgttgcagcaggaatggaagaattgtattggaactacaaaaatgcagttttaagtagtggagcttccagggcagatgaaactgttgtatcaaacatgtctgttgcttttgatcgcatgcttcttggtgtggaggatccttatacttttaatccatatcataaagcagtcagagaaccatttgactactacatgtttgtccatacatacatccgtcctcttattgatttcaaaaattcgtacgttggaaatgcttctatattctctgagctggaagacaagattcgacagggacacaatatcgtgttgatatcaaaccatcaaagtgaagctgatccggctgtcatttctctattgcttgaagcacaatctcctttcataggagagaacattaaatgtgtggctggtgatcgagtcatcactgatcctctttgtaagccgttcagtatgggaaggaacctcatatgtgtttactcgaaaaagcacatgaatgatgatcctgagcttgttgacatgaaaagaaaagcaaacacacgaagcttaaaggagatggctacaatgctaaggtctggcggtcaacttatatggattgcaccaagcggtggaagggaccgcccgaatccttctactggggaatggtttcctgcaccctttgatgcttcttcggtagacaacatgagaagactggttgaacattctggcgctcctggacatatatatccaatgtctttgctttgctatgacatcatgccccctccaccccaggttgagaaagaaatcggagagaaaagattagttgggtttcacggtactggactatcaattgctcctgaaatcaacttctcagacgtcacagcagactgcgagagccctaatgaggcgaaagaagcatacagccaagctttgtacaagtcggtgaatgaacaatacgagatcttaaactctgcgattaaacacagaagaggagtagaagcatcaacttcaagggtctctttgtcacaaccttggaattagtctctcgttttagggtaacactttcaaaactcataaatcttctgtctcagaagttttgttgcaactgtatatatattgagagagagagcattgttctttcatttgcaggatacacaaacacaatcaatggaaaatactc

SEQ ID NO: 178 - protein, 459 aa, Arabidopsis thaliana
MTLTFSSSAATVAVAAATVTSSARVPVYPLASSTLRGLVSFRLTAKKLFLPPLRSRGGVSVRAMSELVQDKESSVAASIAFNEAAGETPSELSHSRTFLDARSEQDLLSGIKKEAEAGRLPANVAAGMEELYWNYKNAVLSSGASRADETVVSNMSVAFDRMLLGVEDPYTFNPYHKAVREPFDYYMFVHTYIRPLIDFKNSYVGNASIFSELEDKIRQGHNIVLISNHQSEADPAVISLLLEAQSPFIGENIKCVAGDRVITDPLCKPFSMGRNLICVYSKKHMNDDPELVDMKRKANTRSLKEMATMLRSGGQLIWIAPSGGRDRPNPSTGEWFPAPFDASSVDNMRRLVEHSGAPGHIYPMSLLCYDIMPPPPQVEKEIGEKRLVGFHGTGLSIAPEINFSDVTADCESPNEAKEAYSQALYKSVNEQYEILNSAIKHRRGVEASTSRVSLSQPWN

SEQ ID NO: 179 - DNA, 2455 bp, Artificial Sequence
  Populus trichocarpa
agtgcgggtgattgggtgaggagtgaagacgctgattttagaggttttgagagagtggcagtctgcagagaataggaatccgaccatatcctccaaaacccgcgctggactcagtcaccgccaatcatcaatcagccacccatcaacaccaaaaatccccgtccttttgatttccaccacataaaaatagcacactgctcctccttcactccattcctatcttaataataataataataataaagctcaactcttctcttctaagtcaagacatgatcctttccattcctgctccttcgtcggcattcttcacaactactaaaccgtctccaccttttcctagggtttctaaactctgcttcttaaccccctcatattctctttcccttcgttttagatccactgctcgacgctccacttcttttccttgtgtcctctcttctctcaaccttcacgcaatggctgaactcgttcaggataaagaagtcttcgcttctgctgaagttgattacagcaagaagaaaaacaggactcgttctcgctcgtttcttgatgcaacaactgaacaagagttactgtcgggaatcaggaaggaatcagaagcaggaaaacttccttcaaatgttgctgcaggaatgaaagatctgtatcagaactacaaaaccgcagttttgcaaagtggaattcccaacgcacatgagattgtattggaaaatatggctgctgcattggatcttatattctttgatgttgaggacccgtttatcttctcaccttatcacaaagctttgagaaagccatatgactactttgaatttggtcaaaagtatatccgtccattgattgattttagaaattcatatgtaggcaatgtttccattttcaatgaaattcaagagaagcttcggcagggtcacaatattgtcttgatatcaaaccaccaaactgaagcagatccagctgtcattgcactgttgcttgaaacatcaagccctcacattgctgaaaacttgatctatgttgctggggatagagttgtcacagatcctctttgcaagccattcagcatgggaaggaatcttatatgtgtatactcaaaaaagcacatgaatgatgaccctgaacattcagaggagaagagaaaagcaaatatccgaagtttgaaagagatggctttgcttttaaggggtggctcacaaatagtctggattgcaccaagtggtggcagggaccgtccagatcccttgtcaggagagtggtatccggcacactttgatgcttcttcagtagacaacatgagaaggcttgctgaacattctggagctccaggacatgtttatcctctggcactattatgccatgacatcatgccccctccgcctcaggtggaaaaggaaattggagagagaagagttatttcatttcatggagttggattatcagttgcaccagaaatcagcttctctgaagttacagcggcatatgaaaatcctgaagaggctaaggaggtatatacagaggctctgtataagtctgtgactgagcaatacaatgtgcttaaatctgctgtacatggaaaacaagggctaggggcgtccattccaactgtttctttgtcacagccatggaattagtcaaccttttctatacttgattaggccaatagttttgttatatagttctgcaactcctggaccacaattctagcggtccttctagtcaagtatgtgccaggagaagcttctctctccatgatgatatggatggctttttctggagatgcaatctaagctacaagtttttgctgtgcttacattctatcaaagccaaatctcacacaatatcttgaagccaaattcatctgaaacgcgagctgttccagaggttcaatttcaggtgtgcagataacagttcctagtaaacacaagagctagtcgtctgaggcgatatacatgtatattttctcaattttttggtggccgatcatattctttttacaccaattgctcaattgctactcatttttctccctcgttcaccttcaataactagaagttttcatgctataacacttgcacacagaagtactatgaacagagttggagcacattttgcctcttgactaaacaagacttgtttttagctgccacaccaaactttttatatgatgcaattatggtagtcgttttctcttgttttggtcaaaacccaaaccagctatagttgctacagccaatcgagagtggtgcatgtttgtttgtttttttttttttttttgtcctcagttatagtaaccatgttcaactgaactatgcatctcttaggacaccacctcttaagccccgtgatctaaccgtgttttcgaattttttttttttttttgggcttttggtttatttaaacgcagcagctttgacccaagttaaaacaaaaaaatctattaaaaaaattgtag

SEQ ID NO: 180 - DNA, 1389 bp, Artificial Sequence
  Jatropha curcas
atgacactttctgcttttccttccacattcctctttagaatacaatcgccatcaacgcctagggtttccatttccctcccttccttatcttcaaagctctgtttggttcctccctctttttctcctccttcgcttgctcttaaatcgagtgcgcgaaggaccatttgtccttgcttgctctcttctctcaacgccaacgtggctcaccttctcaaggaggaaaaagaagttgtggcttcggcttccggctgcgagaaggaggaggaaaagaagatggaacagcctagtcactcccgcactttcctgcatgccagaacggaacaagatttgctgtctggaattagaaaagaagcagaagcagggaggttgccttcaaatgttgcagcagggatggaagaattgtatcagaattatagaaatgcagtgatacaaagtggaacccccaatgcagaagagatcatactgtcaaatatggccgttgctttggatcgtataagcttggatgttgaggacccttttgtcttctcacattatcacagagcattgagagagccgtttgactactataacttcggtcaaaattatattcgtcctttggttgattttagaaattcttatgttggcaatatttcccttttccatgaagtggaagagaagcttcagcagggtcataatattgtcttgatgtcaaatcaccaaactgaagcagacccggctataattgcattgctgcttgagaaaacaaagccctatattgctgagaatttgatctatatagcaggtggtagagtcataacagatcctctttgcaagccattcagcatgggaaggaatcttatatgcgtgtactcaaaaaaacacatgaatgatgttcctgagcttactgagatgaagaaaagagcaaacatacggagtttgaaggagatggccattccattaaggggtgggtcacgaatagtgtggattgccccaagtggtggtagggaccgcccagatcatctgactggagaatggtatccagcaccatttgatgcttcttcagtggataacatgagaaggcttgctgaacattctggtgctcctgggcatatttatccattggcattattatgccatgacataatgccccctccccttcaggtgcaaaaggaaattggagagaaacgagtgatctcctttcatggggttggattatcaattgcaccgggaatcagcttctctgaaattgcgggtagttgtgaaaatcctgaagaggcaaagaacatttattcacaacttctgtatgattcagtgactgcgcaatacaacgtgcttaaatctgccataaatggcaaacgagggctagaggcttcaattccaactgtctctttgtcacaaccatggaattaa

SEQ ID NO: 181 - DNA, 1368 bp, Ricinus communis
atgattctttccattctttcccctacactaccatcgcctagggtttgtatttccatttcttctgtatcttcaaagctctctctagtccctgtctcttctttttctcttcctcctcctttggccatagtaagatggtcatcaaggtcctccatttgtccttgtttcttctcttcttctctcaacgccaatccagtccccgaactcctcaacgatgataagaagaagaacaacaacaacaacaagagcaagaagggaaagtgtactcctcactcccgcacttttcttgatgcaagaactgaacaagagttgctgtatggaattaggaaggaagcagatgcagggaggttgcctttaaacattgcagcagggatggaagaagtttatcggaattatagaaatgcagttttgcaaagtggaattccaaatgcaaaagaaatcatactgtcaaatatggctgttgcgttagatcgtatgtgcttggatgttgaggacccttttgtcttctcaccttatcataaagcactaagagaaccattcgattactataattttggtcaaaattatatccgtcctctgattgattttaggaattcatatgttggcaacatttcgcttttccatgaagttgagcagaagcttcagcagggtcacaatattattttgatgtcaaaccaccagactgaagcagatccagctgtcattgcattgttgcttgaaaaaacaaatccctacattgctgagaatttgatctacgttgcaggtgatagagttgtaacagatactctatgcaagccattcagcatgggaaggaatcttatatgtgtgtactcgaaaaaacacatggctgatgttcctgagcttactgagatgaagaaaaaagcaaacattcgcagtttaaaggagatggtcatgattttaagggatgggtctcaaattgtttggattgctccaagtggtggcagggaccgcccagattctttgactggagaatggtgtccagcaccctttgatgcttcttcagtggataacatgagaaggattactgaacattctggcgctccaggacatatttttccattagcgttgttatgccacgatatcatgccccctccacctgaggtacaaaaggaaattggagaaagaagaatgatctcctttcatggagctggattatctattgcacccgaaatcagcttctctgaaattgctgttgcttgcgaagatcatgaagaggctaagaacgcatatgcacaggttttatatgattctgtgactgagcaatacaatgtgcttaaatctgccatacatggaaaacaaggactagaggcatcaacttctaccgtctcattgtcgcaaccatgggattag

SEQ ID NO: 182 - DNA, 1344 bp, Helianthus annuus
atgtcgattctcccgtcttcttctcctactctcttcttctccaccgcaaaccctagggtttctgtttctctttcacttacttctacagtttctacatcttcatccgtgcgcagtcgctcgattttccggcattttccgtacctagcgttttctagggcagcgaatgccgccgcggagacgtttgaaggcaagaagtggtcgtcgtcctccgctacacaaccgatctccggatccgagctcggttactcgcatacattcatcgatgctctgtctgaacaagatcttctttctgtaattcaaagagaggtagaagctggagcactgccaaaacatatcgctcactcaatggaggaactctatcagaactacaaaaatgcggttttccaaagtggtaatccctgtgcagaagatactgtattgtcaaacatgcgtgtagcatttgatcgaatgttcttggatgtgaaggagcctttcgaattttcaccgtatcatgaagctattcgagagccttttaattactatatgtttggtcaaaattatattcgtcctctgatcaatttcagggaatcatatgttggcaacgtctctcttttcagtgaaatggaagaacaactgaagcagggtgaaaatgtaattttgatctcaaaccaccaatccgaagcagatccagctgtcattgccttgttgcttgaaacaacaaatccttatatttccgagaacataatctatgtggcaggggacagagttataacggatcctctttgtaagcctttcagcatgggaaggaacttgctgtgcgtatattcaaaaaaacatatgaacgatgttcctgagcttgctgatatgaaaaggagagcaaatacaagaagtttaaaagagatggctttgcttttgaggggtggatcaaaaataatatggattgcaccaagtggtggaagggacaggcctgatcccgtcacaaatcaatggtttccagcaccattcgatgccagttctctggacaacatgagaaggcttgtggaccatgctggtgtggtgggtcatatatatcctttagccatactatgccatgacatcatgccccctcctcctcaggttgagaaagaaattggagagaaaaggttgatatcttttcatggcactggaatatcagttgcacctgaagttgatttccaaaacgccactgcttcttgtggatcccccgaggaggccaaggcagtttattcacaggcactttatgattcagtgtgcgagcaatacaacgtgctacaatccgccataaatggagcaaaaggcttagaagcatcaacatcaagtgtctcattgtcgcaacctgttgactag

SEQ ID NO: 183 - DNA, 1374 bp, Medicago truncatula
atgtttacaacaccattttcttctccttcaaccgcatttttctctccacctaaagcctcatattcttcttcttcttcttcttcttcttcttcttcttcgttacctcttcgtagttctttcactttttatcatcttcgatttaatgcaacaacttcttcttcttctgtaacaacttctggaacttcttcttcttcatattgttctcctcttgctttcaattctaataataaaaaacctaaagaaatttctgctaatatggcggcttcttctgtttcttctcgcactttcctcaatgccagaaatgaacaagatgttctttctggaattaagaaggaagtagaagccggaactttgccccccactattgctgaagggatggaagaattgtaccttaactataaaagtgcagttgttaaaagtggagatcccaaagcagatgagattgtattgtcaaatatgactgctttattagatcgcatatttttggatgtgaaggagccttttgtctttgaagcacaccataaagcaaagagagagccttttgactactacatgtttggccaaaattatattcgtcccttagttgatttcaacacttcttacgttggcaacatgccccttttcatacaaatggaagagcaacttaagcagggacacaatattatcttgatgtcaaaccaccaaagtgaagctgatccagctattattgcattgctgcttgaaatgcgacttccacatattgctgaaaacttgatttatgtggcaggagatagagttataaccgatcctctatgcaagcccttcagtattggcaggaatctgatctgtgtttattcaaaaaagcacatgcttgatgatccagcacttgtagagacgaaaagaaaagcaaatacacgaagtctgaaggaaatggccacgcttttaaggagtggatcacaaataatttggattgccccaagcggtggtagggatcgaccagttgccaactctggggaatgggcaccggcaccctttgattcttcttcagtggacaatatgcgaaggcttgtcgatcattcaggtccaccaggtcatatctatcctatggcaatactgtgccatgacataatgccccctccactaaaggttgaaaaagaaattggggagaaaagaattatatcatatcatgggactggcatatcacttgctccagaaataagcttttccgacatcactgcttcttgtgaaaatcctgaaaaggctaaagaagcatactcgaaagccttgtatgattctgtgactagtcaatatgatgtgctggagtctgccatacacggcaaaaaaggattagaagcatcaactcccgcagtttccttgtcgcagccatggaagtag

SEQ ID NO: 184 - DNA, 1967 bp, Glycine max
ggctgagactgaggagcggatcctatctctctttcacacactctccttctctttcgtatgaagaatgagcacgaccggttcttcggcttaccactgtgtggcacacctcccaaataataagactatgtttatgctctctacgccgccaacaaccacattcttcgctacgcctagggttcttccgtttctctcttcaaaactttcttcttcttcttcttcttctactgcgtcgtcctcgccttgttgctcctccatcactcccaaggttaaatccaaagataacaacaattgctacctcgtctccgctaaacattctcccgctaacatgtccgcttcggtttcgtcacgcaccttcctcaacgctcggaacgaacaagagcttctagctggaatcaggaaagaagtagaagctggatctctgcctgctaatgttgctgcaggaatggaagaagtgtacaataactataaaagtgcagttatccaaagtggagatcccaagtcaaaggagattgtattgtcgaatatgattgctttattggatcgcatattcttggatgtgacggatccttttgtctttcaaccacaccacaaagcaaagagagagccttttgactactacgtgtttggtcagaattatatccgtcctttagttgatttcaaaaattcttatgttggcaacatgccccttttcattgaaatggaagagaaacttaagcagggacacaacatcatcttgatgtcaaatcaccaaactgaagctgatccagccatcattgctttgctgctcgaaacacgactcccatatattgctgaaaacatgacctatgtagcaggagatagagttataactgatcctctgtccaaaccattcagtattggcaggaatctcatttgtgtttactctaaaaagcacatgcttgatgatccagctcttgtagagatgaaaagaaatgcaaatatacgagctctgaaggaaatggctatgcttttaaggagtggatcacaaatagtctggattgccccaagtggtggaagggatcgcccagatccccacaccggagaatgggcaccggcaccctttgatacttcttcggtagataatatgagaagacttgttgaacattctggtccaccgggccatgtatatcctttggcgatattgtgccatgatataatgccccctccactaaaggttgagaaagaaattggggagaaaagaattatatcctttcatgggactggcatatcagtggctccagcattaagcttttctgaaactactgctactagtgaaaatcctgaaaaggctaaggaggtattcacaaaagccctgtatgattctgtgacggagcaatataatgtgctgaaatctgcaatacatggcaaaaaaggatttgaagcatcaactccagtagtttctttgtcacagtcatggaagtagatgaaatctgcatttcttcattgcaatttgctctgatgcagaagcaagttacaagacttcagtcaaacaatttcaactgattcacttctgagggactgcctattactacaccggtcaccgaatgatttagcttgttggaagtttgcagtcaaatacatatttttcatttcatttttccttttgctcttggttgccgttatcagcattcaattcatctggaatctgtttcagttcagaaggttcaaattctgctgcttactgtacaggtctctcttagttcggtgtcagatttggttcgttgactgataaaatactaaattttttacctacaattttgtgatcaggcttagctagctgaatagataaaatataattggttccatttgtattttaagtcaactttgttccattatagatgaatagatgttagtattacatgttcagacggggtcagtgaataaactggtccaaatgctaatgcaaaattattcatattggtaaaataaaagctctacagttaccgtta

SEQ ID NO: 185 - DNA, 1674 bp, Carthamus tinctorius
tctctctctctcacacacaacacacaaaacacacactactgctactttctctctctactacactctcctctcgctatgtcgatcttcttctctccttcctcccctactctcttcttctccaccacaaacgcaaatcctagggtttctccttcatcttcaccttcttctgccttcactcctcctctgtcttcttctcgcctccgcccgattctccgggggtttccgtgcctcgcgttctctgcgccggcgaatgccgcccatggcacggcggagaccgtccacggcaataagtggccgtcaccgtcgtcctcctcctctgctgctacgcaaccgtccgctggatccgaccacggtcactctcgtacattcatcgatgctcgttccgaacaagatcttctttctggaattcaaagagagttggaagctggaacactgccaaaacatattgctcaagcaatggaggagctatatcagaactacaaaaatgcagttctccaaagtgcggctcctcatgcagaagatattgtgttgtcaaacatgcgtgtagcgtttgatcgtatgttcttggatgtgaaggagccgtttgaattttcaccatatcatgaagctattttggaaccttttaactactatatgtttggtcaaaattatattcggcctttggtcaatttcagggaatcatacgttggcaatgtctccgttttcggtgtaatggaagagcagcttaagcagggtgacaaggtggttttgatctcaaaccatcaaacagaagcagatccagctgttattgccttgatgcttgaaacaacaaacccccatatttctgagaacataatctacgtggcaggggatagagtaataacagatcctctttgcaagcctttcagcatgggaaggaatctgttgtgcgtgtattcaaaaaagcatatgaatgatgttcctgagcttgctgagatgaaaaaaagatcaaatacaagaagtttaaaagggaggatggctttgcttttgaggggcggatctaaaataatatggattgcgccaagtggtggcagggacaggccagatcctatcacaaatcagtggtttccggcaccgtttgatgccacttcgcttgacaacatgagaaggctcgtggaccatgctggtttggtgggtcacatatatcctttagccatattgtgccatgacatcatgccccctcctcttcaggttgagaaagaaattggagagaagagttggatctcttttcatggcaccggaatatcagtggcaccggaaattaatttccaagaagttactgcctcttgtgggtcccccgaggaggcgaaggcagcttattcacaggcactctatgattccgtgtgtgaacaatacaaggtgctacattctgcggtacatggaggaaaagggttagaagcatcaacaccaagtgtctcgttgtcacaacccttgcagtttctcgattagtctcttggtttagaggaggtgaaagcatattcttttgtttagatgacataggtgtatagatgataccgaagaatagatgtacaaacaagtgatagaaagatgtatgtctaatcaaaaaatgttttctgcatcttgtaaagggatcttcaaaacagaccttttattttagctgcagcaaccaatatatcaaaacaggtttttcttttt

SEQ ID NO: 186 - DNA, 1893 bp, Solanum tuberosum
cgcacatattcatttcactcactttctttcccgaccctttctctctctaaagctctccagtctgtggtgatgttgatcctctcagcggcttcgtcttcttcttcctccttcatgctttcttccgcttcgtcttcttctgcacgcattccgaggcagttatcttcattttcaacttgtgttccagtagtagtaacaactgtttcttctgcagcaacttcgactctatttccgatttcctgcttcggtgtgaaatcgaggactgttgggattcggaagctgcggtgtgccgttttttgtgcttcgaaggtacgtggaatggcagaaatgattgaagatgccatgacggtttctgcttctgagagccatgagcttccgcagtcccgagacttccttgacgcacgcactggagaagacttgctatctgctgttcaaaaagctgtggaagatgaaaaactgccgcttaatgttgctgaaggaatggaggatttgtatcagaactatcggaatgcagttttacaaagtggagtccccaaagcagatgaggccactttgtataacatggctcttgtatttgatcgtgtttttgtggatgtgaaggatccttttgaattctcgccatatcataaggccattcgtgaaccttttgactattacaagtttggtcaaaattatatccgccagctagttgatttcaggagttcttatgttgggaatatctcagttttcggtgaaatggcagagaagcttaaacagggtgataatgttgtcttgatgtcaaaccatcaaagtgaagccgatcctgcgattattgcactcttgattgaatcaaagctcccagatattgctgagaacattatttatgttgctggagatagagttattactgatcctctttgcaagccattcagcatgggaaggaatctcctgtgtgtttattcgaaaaaacatatgaatgatgaccccgaacttgctgagatgaaaaagagagcaaacacaagaagcttgaaggagatggctttgctattgaggggtggatcaaaaataatatggattgctcctagtggtggaagagataggccagaccctgttacaaacgaatggtatccagcaccatttgatgcttccgcgacagacaacatgaggaggcttgtacaacatgctggtgtccctggtcacatttatcctctagcaattttgtgccatgatattatgccccctcccgcccaggttgagaaaaatatcggggagaaaagagttgtatcttttcatggagctggcatatctgtggcacccaaaattgattttcatgaggttgctggtgctttggaggaccctgaggctaagatggtatatacaaaggcactttatgactctgtaagccagcagtacaatgtgctaaattctgctatacatggcaaacaaggactgaaggcatcaatacctagtgtttcattatcacaaccatggcagtagcttctcttccaactttatttttcatatcttgttgctgtagtcagttttgcagatgtttgtttggcagttacaatcaaatcacaaggattacactcacaatctttccacataccacgcttgcatgtggttagtctatgcagaaagttgatacaaacaaagtaattctcgaagttacagcaaacataacctgaaggaatttttttggcagggttagataattcttttgacacgaatgtacagttgctttacattgtatttataccaaatgttagatccaaatttgttagtaatgatagctttcaagtactcaattctgactttttaaggtcaagtgttagtagctatcctagattgctgctcatcttgcctttgaagtggtaatccaatttgttgagaaatataataaatgatgctctgcta

SEQ ID NO: 187 - DNA, 2016 bp, Oryza sativa
gggctggagatggagatggagatggagatggagggtgggtttggcacaaatcccgaagcgctccggcgaccactcccaacccagtccccactagggtaacaaccccctttcggattaggtttctagaagcttcttctatgcaggcgccgccgctcgcctcctcgccgtcgccggcgtggaccgccatcctgcccgcgccggcgaggctctgctgctcccgccgcggcgccctccgcctcgaagccaaggccgcctggaggccggcggcccgagggccgcgggtgccggccaagggcgccgtcctcgcctccgaggtggtgggcccctctcccctcctcgacgcgcgcaacgagcaagagctcattttgcatatcagaaaggaagtggagaaagggaagctgcctgcagatgtcgctgccaatctagaagagctatactacaactacaaggacgcggttatgcagagcagggatccaaatgcacacgacatcgtgctttcaaacatggtggccctgttcgattgtgttctgctcgatgtagagaatccgtttacctttccgccttatcacaaagctgtcagggaaccattcgactattacatgtttggtcagaactacattaggccccttgtagactatagaaattcatatgttggtaatatatccattttccaagacatggaacagaagctccaacagggccataatgttgttctgatgtctaaccatcagacagaagcagatccagcaatcattgctttgctgcttgaaagaagcaacccatggatcagcgaaaacatagtttatgttgctggtgatagggttgttacagatcctctctgcaagccatttagtatgggaagaaacctcatttgtgtgtactcaaaaaagcatatgaatgattttcctgagctagttgatatgaagaggagggcaaatactcgtagtctgaaggaaatggctttacttttacgtggcggttcacagataatttggatagcaccaagtggtggtagagatcgtccggatcctttgacaggagaatggcatccggcaccatttgatgcatctgcagtggacaacatgaggaggcttctggagcattctggtgttcctgggcacatatatccactctcactgctctgctatgaggttatgcctccaccacagaaggttgagaaagagattggtgagcaaagggttatatccttccatggtgtaggcttgtcagtaactgaagagataaagtacagcgacattacggttcatacccaaaatgtcgacgagtgcagagagaaattctcagagtcattgtacaactcagtcgttgatcagtataatgcgctcaaatctgctatctttagaggtcgaggagcagattcatcggacagtgccatctcactctcacaaccatggcgatgaaactccgctttctcagttttgttctgtctggatttctcaatgaagttaccttcatttcttttcgacacagcagatgaactgctgccgacattgcaatttttcctggcagaaccttttaaacttcggtatcctaacccatactaatcatgaaggggaggctgttactgtcatgcaaatcttgcctagtatgatgattttacccagctgaatcccagccacacatgatgcgttcgttcattgtttgcacacaaatattattgcgtcatatgagtattctttgggtcagaactgcacagcaacgcggcctgggcactcaatctggcatgttgtctatggggtgcatgcttgttaacagaagaagcccaacatgtgggattttgttttttgcggttaatttttttcctgttttccttttgttccatgtatatatattcgattttgatctccaggtttggagatacaatggtcaaagtgttatgatagtctcttagtttgttgcctcgaagttatactcgggcgcaacatgtctgactgatattctgatgatgttactcgtttctgaacttcctgacgccaatatggtgcttggatgttg

SEQ ID NO: 188 - DNA, 1888 bp, Sorghum bicolor
atgcacgcgccgccgctggtcgcgttcgcagggggcgcctgccccgccaccgccgcctcgtcctcgccgtcgccctggctggcctcgccgcgggccgccatcctcgccgcgccggcgaggctcctacggtcccgccgcggggcacttcggctggaagccaaggccgcgtggagggctgccggagggggacggggcccgagggtcccggccaagggcgctgtgctcgcctcctatatgggcgccgaggaggtggtgggaccttcgtcgctgctcgacgaggaagagctcatttcacatatcagaaaggaactggataatggaaaactccctgcagatgttgccagtaatctggaggagttgtattataattacaggaatgctgttctgcaaaatggagatcctaatgcatatgagatcatgctttcaaatatgacggctttgtttgatcgtgttctactggatgtacagaatccatttacctttccaccttatcacaaagctgtgcgagaaccgttcgactattacatgtttggtcagaactacattaggcctctggtagatttcaggaactcctatgttggcaacatttcactttttcatgacatggaagagaagctgcaccagggccacaatgttgttttgatgtctaaccatcagacagaagcagatccagcaattatctccttgcttcttgaaaaaaccaatccatggattagtgaaaacatagtttatgttgctggagatagggttgttatggatccactttgcaagccatttagcatgggaagaaatctcatttgcgtgtactcgaaaaagcatatgaatgattttcctgagctagttgagatgaagaggagatcaaatacccgaagtctcaaggaaatggccttgcttttacgtggtggctcacagttaatttggattgcaccaagtggtggtagagaccgcccaaatccttcaacaggagaatggtacccggcgccattcgattcatctgcagtggacaatatgaggaggcttctggagcatgctggcgttcctgggcacatatatccactatcattgctgtgctatgaggttatgcctccaccacaacaggttgagaaagagattggtgagcagagggtgatatccttccatggagtaggcttgtcagtaactgaagaaataaaatatggggatattactgctcataccaagaatgctgatgagggaagggagctattcacaaatactttgtacaactcagttgttaatcagtacgatgtgctcaaatctgctatctttagagatcgtggagcagctgtatcaaacaatgtcatctcattgtcacaaccatggagatgaatgttagctttctcagtttgggtccagatttattactgaagttaccttttcagaagagcaggtgaactgccattgtgcaatttcactggagaaactcttgaactttaatctttttgataccactcgactttatcagtcatggtggagcctgtcattgtcatgcagatccttgctaagaagtctgtggacaactgttggttggtcaagggtgactggtgattctgcacatagggatcctcgtaactgttgcatgcggtcgtccgcaaattactggttgctcagcaacgtgctggttgggcactgaggaatccgtcaggttgcatcctttttgccttgacgtcaatttgtgtagttgaaggttgaagtgataaattgttttatcttgtcttgtcatcatgtatataggctcgagtcttttttggctccacatttttttggagatataaaagcagcaggagttatgacatgccctcagtcggccctccttgttgaaaccctttggatgtaacctgtctatttcttatatatactcactgaaagt

SEQ ID NO: 189 - DNA, 2046 bp, Zea mays
gaggattcatctcgtgtcgacgacgccttcgccctctccgagtctccgtccgtcttccgcgtcctccgcagctggactcgtgcgctattccccaggacgctactcccactagggttttcggattaggtttctagaaccttccaccgccgcctctccatgcacgcgccgccgctggtcacgttcgcagggggcgcctgccccaccaccgcctccgcttcgccgtcgccctggttggcctcgccgcgggacgccatctttgccgcgccggcgaggcccctacggtcccgccgcgggacactccggctggaagctaaggccgcgtggagggctgccggagggggacggggcccgcgggtcccggccaagggcgctgtgctcgcctcctatatgggcgccgaggaggtggtgggaccatcgtcgctgcttgacgaggaagagttcatttctcacatcagaaaggaactggataatggaaaacttcctgcagatgttgccagtaacctggaggagctgtattataattacaggaatgcggttctgcaaaatggagatccaaatgcatatgaggtcatgctttcaaatatgatgaccttgtttgatcgtgttctactggatgtacagaatccatttaactttccaccttatcataaagctttgcgagaaccgttcgactattacatgtttggtcagaactacattaggcctctggtagatttcaggaactcctatgttggcaacatttcccttttccatgatatcgaagagaatctccaccagggccacaatgttgttttgatgtctaaccatcagtcagaagcagatccagcaattattgccttgcttcttgaaaaaaccaatccttggattagtgaaaacatagtttatgttgctggcgatagggttgttaccgatccgctttgcaagccatttagcatgggaagaaatctcatttgcgtgtactcgaaaaagcatatgaatgatttccctgagctaattgagatgaagaggagatcaaatactcgaagtctcaaggaaatggcattgcttttacgtggtggttcacagttaatttggattgcaccgagtggtggtagagaccgcccaaatccctcatcaggagaatggtacccggcaccattcgattcatctgcagtggacaatatgaggaggcttctggagcatgctggtgttcctgggcacatatatccactatcattgctgtgctatgaggttatgcctccaccacaacaggttgagaaggagattggtgagcagagggtgatatccttccatggagcaggcttgtcagtaactgaagaaataaactatggagacattactgctcataccaagaatgctgatgagggaagggagctattcacaaataccttgtacaactcagttgttaaccagtacaatgtgctcaaatctgctatctttagagatcgtggagcagctgtatcaaacaatgtcatctcactgtcacaaccatggcgatgaatgtccagtttcgttactgaagttaccttttcaaaagagcaggtgaactatcattgtgcaattttgctgggagaaactcttgaacttaaatctttttgatatcactagacttcatcaatcatggtggagcctgttattgtcatgcagatgctcgctaagaagtctgcaactgttggttggtcaagggtgattggcgattttgcacatacggatccgcagttactgctgcctcaggttgctcagcaatgtgctgctggttgggcaccgaggaatccatcaggttgcatcctttttgcccggacgtcgatttgtgcagttgaagtggtaaacgtttttttatcttgtttcgtcatcatgtatatacgtaggcttgagtcattgttggctccacattttttggagatataaatgcggtaggagttatgagatgtccacagtcggccctcccttgttgaattcctttggatgtatcctctctctttcgtacatgcactcactgaaagtcaatgcaaatatctcgtgtttctagtaaaaaaaaaaaaaaaa

SEQ ID NO: 190 - DNA, 1994 bp, Hordeum vulgare
gagaaaccaagaagcgagaatcggcaccgttcccgtcgccgcctcgtcgcctccgtcgcccgtcttccttttccgccgattcgtgcccaccaccaccactctccttcccactggctagggttttcggtttctagaacctcacgcccgcccgctccatgcaagccccgccgctcgccgcgctcgccggaggcgcctgggcctctcaccgacctgccatactagcggcgccggcgggcctccgccgtcccaggcgctgcgccctccggctgcccgcgtggagggcggccggaggcggccgggccccgcggctaccggtcaagggcgccgtgctcgcctccgacacgggggcggacgaggaggtcgcggggccatcgcccctgctcgacgtgcgcagcgagcaagagttcgttctacgcgtcaggaaggaagtggagagagggaagttgcgtccagatgttgctgacaactttgaaaacctgtactgcaattacaagaatgcggtgctacaaaatggggatccaaatgcatatcagatcatgctttccaacatgatggatttatttgaccgcgttctgctagatgcagagaatccatttacgtttcagccttatcacaaggccatcagagaaccgtttgactattacactttcggtcagaactacattaggccactggtagattttaggaactcttatgtcggtaacatttctgtattcagtgatatggagaagcagctccggcagggtcataatgttgttctgatgtctaatcatcagacagaagcggatccagcagttattgccttgtcacttgaaagaagcaatccgtggattagcgagaacatagtttatgttgctggggatagggttcttacagatcctctttgcaagccatttagcatgggaagaaacctcctttgtgtgtactcaaaaaagcatatgaatgattttcctgagctaattgagatgaagaggagggcaaacactcgaagtctcaaggaaatggctttgcttttacgtgggggttcacatataatttggatagctccgagtggcggtagagaccgtcctgaccccttgactggagaatggcacccggcgccatttgatgcatctgcagtggataatatgaggaggcttctggagcattctggcgttcctgggcacatatatccattatcattgctatgctatgagattatgcctccaccacaacagattgagaaagagattggtgagcaaagggtgatatccttccatggtgtaggcttgtcagtagctgaagaaataaagtatggggatgttactgctcaatctcagaatgctgatgaggcaagggggaacttctcagaggctctgtacagttcagttgttgatcaatataatgtcctcaagtctgctatctttagagaccgtggagcagtttcgtcgaaccctgccatctcactctcgcaaccatggcggtgaaactaagctttctcaggcctggatttctcatttcttttcgacagagcagatgaactgctatagtgcaacgttgtggttttttgctgggatggccttaaactttgatgtcgtcacagttaggatgaggccctgcagatcctgtaagttgttgaagtcgcgggaaggaaaaaccgtgtgatatgctgctacaccgtgttcatgtagtgacaggaagtctgcggctgttgtcaggtctaaatcctaaatagcacggcggaacccagcagcagatgatgcatgtgttcatcttttgtgaacagctactgctgtatcagatggctatcatctgggccagattggtccagcaaatacagattggcccctggatcctggcagtcgtctggatcaaaatgctgatatttctttttgtgctcgtcttatttttttgattagttttgtgtacatattaattcttttgctccaaaatttggagacacatgacatgatatatacagagcagagcccaatatgtgtcgccttcctgttaac

SEQ ID NO: 191 - DNA, 1936 bp, Physcomitrella patens
ggacgagcggagtggagagctatggcggcagcagctggttccgctggcgtggtatgttggtctagggcagagaagcagcatgccccggtcagggggggtggaactagtgttaccagtagtaccagtggcagcggccatgcgtcgttgaaagggagcttcgatcggctccaaggtaaccgccttctgccgcaagccttgactatgccgtcgctgtttcgggcgaaacgcaatggcagaaggacgccggggaatgccgtgaccaatttcgggaaatctgaattccatcgtgaaattagtgggagtacgcgggcgaccacgcaggtggctgaagccaccacagctggtcttagggagaccattgaggaccgcgctattatcgacggtcattctcacagttttgaaggaattcaatcggaagaagagttgatgcaggtaattgaaaaggaggtggaatccggtcggctgccgaagcgtgctggcgcgggaatggtagagttgtatcgcaattatcgagatgctgtagtgagcagtggcgtagaaaatgcgatggatattgttgtgaaagtcatgtcaactgtgttggaccggattcttctgcagttcgaggagccattcacatttggatcgcaccacaagagaatggtggagccgtatgattactacacatttggtcagaactatgtgcgtcctctcctagatttcaggaactcttaccttgggaacttaaagatctttgaccagatagagaagaacctgaaagaggggcacaacgtcatttttctatccaatcaccagactgaggcagatcctgctgttatggcgctgttgcttgagcactctcacccctatttggcagagaacttgacctatgtggctggagacagggttgtgctggatccattctgcaaaccttttagtatgggcaggaatctcttgtgcgtgtattcaaaaaagcacattcacgatgtaccggaccttgctgaaatgaaaatcaaagctaatgcgaagactttgagacagatgacgatcctgctgaggcagggaggtcaattattatgggtagcacccagtggtggacgcgatcgccctgatcctgagaccaacgaatgggttcctgcacattttgactcgtctgctgtggagaatatgaagcgactatctgacattgtccgagtacctgctcatttacatgccctatcattactatgttttgagattatgccacctcctgtccaggtacaaaaggagctaggagagcgaagagcagtaggatttagcggagttggtctagccgtttccgagcaactagattatgattccattgcgaagttagtcgacgattccaaaaatgcgaaggatgccttttcggatgcggcatggagcgaagtcaatgatatgtataacgtgttaaaagaagcaatttatggtgaccaaggttgtgctgttagcacagattccttgagactggaacagccctggtttgatggaagcaggcgaactgattgaaaataggtcatttgaagttttatgtaaaagtatgaagcatccttattgctttttacgctgtctaagctccaaggatgtaagaattcagcagcgtgtataatggctacattgtcatgtgatattctttctgattcgtgcgacacgatggccatgcctgctcaatccttgtcaccaggcgtctcagtaggaaacggtggtactgattgctgtctgtccgacttgatttagtagctcggattctgcgtactggataacttggtctggtaatagggaccgatcctatcggtgaggagtttgtgatatagatcaatactgcactttgttacaatcggaatagatgcattcattattcatccaagccaacacatcctgagttggagcataagttgaagcactcctcaacttcattgaaaggagatttctcactacg

SEQ ID NO: 192 - DNA, 2260 bp, Chlamydomonas reinhardtii
gaagaatgctgcacgcgactcagcagcgcgcggtcgctggccgtcgcccgttctcgggtgcgcgcgcgtcgaaccgcgttgttgctcacgcggctgcgaccgtcgccaccagtctgccgaccgttgacgtccagttccaccagcctaagctggcgggcgtgaccaacgagcagcagttcaaggcggtaatcaaggggctggtcgctcagggcaagttccctccgcagctggagcccgcttgggattacttctatgacaactacaagaaggctgtcaccagcagtggcgtcgctggggccgatgagaagcttgtcacccaggtgcaagccagcattctggacaatgtcctgaaccaggcggtgaacccctacaccttcccctctttccacacccgcctaattgagccctacaactactatgacttcggtcagcgctacgtcgcgaccctcatcgacttccagaactccgtgctgggtttccgcgagcgtttcgaccgcgttcaggagctgctggaccagaagcacaacgttgttatcctcgcgaaccaccagacggaggccgaccccggtgtgtttgcccatatgctggcgaagacgcaccctaagctggcgacggatgtgatctacgtcgctggcgaccgcgttgtcaccgatccgatgtgcaagcccttctccatgggccgcaacctcttctgcgtgcactccaagaagcacatggacgacgctccggagctgaaggccgcaaagatggagaccaaccgcaagacgctggtcgccatgcaacgcaagctgaacgagggcggcacgctcatgtggatcgcccccagcggcggccgcgaccgccccaacgccaacgacgagtgggtgcccgataactttgatcccgccgccgtggagctgatgcgcaacctggtgcagcgcgccaagcagccgggccacctgatgcccatgtccatgttcagctaccccatgatgccgccgcccaagaccgtggacaagtccattggcgagcgccgcctcacggccttcacgggcgtgggcatctccctgtgcgaggagctggacgtggcggccatcatcgcggccagcggctcggaggagaaggagcagaaggctctggccaaggccgcgcacgacgcggtgaaggagtcgtacgcggtgctgtccaaggccatccaggatcccgccttccgcgccacccgcaaggagttcacacagccctggatggcgtaaggaggcgggagcagcagcggcagtggcggcagcgacagcagtggcggatcttgggggcacgaggcagcagctagcacacgcggggccggtggcggcagcggacgggagaggtgctggtgcggatgctggtgccaggagcagtgcgtctatgcctggcggcggcgccgaccggtgctgaagctgttgtcggcagcagcagcgggaacttgcgctggcgatggctgaaggtgatgtggctggccgtacagcaaatgctgctgtcacgcattgtcagcggcggccgctgggtccgctgggatgtgaggagtgcgagatcagcataggccaggcgggtgggttgcggtgccgctgccgacacgtcgcacaggaaggagcaggaagggtgcggctgagcaccagggtcacttggggcctgtgttagcgtgaccgggcctgaaaggggtatttgtctggggagcagctcgacgcacattcgtgggattgcttaggaaggagcgttgggatggctgtgccgcgcggtgtgcccagcacgttgactggctctgacccgggtcaaccaatgcgttgcggccgttgcaacgatgcttctaatcagcgtgagatggagtgtacgaatgcaggtatgacgatgaccatagacgagtgtgagcgtgtgtatctgtggattggacacggttcattcaatccattcgtaccggacatatgactatacaagaccgtgtggagtgtgtttgtgcgctcaagactggacgaagtgggcgctcccgatgtggagcgcggtgctcgcgggttgtgtgtcttgccgcaacgcaagcagcgtggcgtggtgtggatgattcttgcattatgactggggttttaccggcggcccagagcgtgtgtggagcaaaagcaaaaacaggaacaaggagccgtgtgcacaattcgcgcggatggtggtggctggggatctgacaggagagtgccaacggcggccgggtgctagtgcttgaacatcatgtgatattgtgattgtacaaatggactgc

SEQ ID NO: 193 - protein, 362 aa, Arabidopsis thaliana
MLKLSCNVTDSKLQRSLLFFSHSYRSDPVNFIRRRIVSCSQTKKTGLVPLRAVVSADQGSVVQGLATLADQLRLGSLTEDGLSYKEKFVVRSYEVGSNKTATVETIANLLQEVGCNHAQSVGFSTDGFATTTTMRKLHLIWVTARMHIEIYKYPAWGDVVEIETWCQSEGRIGTRRDWILKDSVTGEVTGRATSKWVMMNQDTRRLQKVSDDVRDEYLVFCPQEPRLAFPEENNRSLKKIPKLEDPAQYSMIGLKPRRADLDMNQHVNNVTYIGWVLESIPQEIVDTHELQVITLDYRRECQQDDVVDSLTTTTSEIGGTNGSATSGTQGHNDSQFLHLLRLSGDGQEINRGTTLWRKKPSS

SEQ ID NO: 194 - protein, 367 aa, Arabidopsis thaliana
MLKLSCNVTDHIHNLFSNSRRIFVPVHRQTRPISCFQLKKEPLRAILSADHGNSSVRVADTVSGTSPADRLRFGRLMEDGFSYKEKFIVRSYEVGINKTATIETIANLLQEVACNHVQNVGFSTDGFATTLTMRKLHLIWVTARMHIEIYKYPAWSDVVEIETWCQSEGRIGTRRDWILKDCATGEVIGRATSKWVMMNQDTRRLQRVTDEVRDEYLVFCPPEPRLAFPEENNSSLKKIPKLEDPAQYSMLGLKPRRADLDMNQHVNNVTYIGWVLESIPQEIIDTHELKVITLDYRRECQQDDIVDSLTTSETPNEVVSKLTGTNGSTTSSKREHNESHFLHILRLSENGQEINRGRTQWRKKSSR

SEQ ID NO: 195 - protein, 412 aa, Arabidopsis thaliana
MVATSATSSFFPVPSSSLDPNGKGNKIGSTNLAGLNSAPNSGRMKVKPNAQAPPKINGKKVGLPGSVDIVRTDTETSSHPAPRTFINQLPDWSMLLAAITTIFLAAEKQWMMLDWKPRRSDMLVDPFGIGRIVQDGLVFRQNFSIRSYEIGADRSASIETVMNHLQETALNHVKTAGLLGDGFGSTPEMFKKNLIWVVTRMQVVVDKYPTWGDVVEVDTWVSQSGKNGMRRDWLVRDCNTGETLTRASSVWVMMNKLTRRLSKIPEEVRGEIEPYFVNSDPVLAEDSRKLTKIDDKTADYVRSGLTPRWSDLDVNQHVNNVKYIGWILESAPVGIMERQKLKSMTLEYRRECGRDSVLQSLTAVTGCDIGNLATAGDVECQHLLRLQDGAEVVRGRTEWSSKTPTTTWGTAP

SEQ ID NO: 196 - protein, 345 aa, Arabidopsis thaliana; identical to SEQ ID NO: 60

SEQ ID NO: 197 - protein, 303 aa, Arabidopsis thaliana; identical to SEQ ID NO: 57

SEQ ID NO: 198 - protein, 445 aa, Avena sativa
MKRSPPPAPPAAPPPPQPSPSSSSPACSPSPSSSSCPSSSDSSSIVIPRKRARTQKAASGKPKAKASAKRPKKDASRSSKETDANGAAAAAGKRSSIYRGVTRHRWTGRFEAHLWDKNCFTSVQNKKKGRQVYLGAYDTEDAAARAYDLAALKYWGSETILNFSVEDYAKEMPEMEAVSREEYLAALRRRSSGFSRGVSKYRGVARHHHNGRWEARIGRVLGNKYLYLGTFDTQEEAAKAYDLAAIEYRGANAVTNFDISCYLDQPQLLAQLQQGPQVVPALQEELQHDVQHDLQNDNAVQELNSGEVQMPGAMDEPIALDDSTECINTPFEFDFSVEENLWSPCMDYELDAILGNNTSNSANMNEWFNDSTFESNIGCLFEGCSNIDDCSSSKHCADLAAFDFFKEGDDNDFSNMEMEITPQANDVSCPPNDVSCPPKMITVCN

SEQ ID NO: 199 - protein, 420 aa, Sorghum bicolor; identical to SEQ ID NO: 34

SEQ ID NO: 200 - protein, 395 aa, Zea mays
MERSQRQSPPPPSPSSSSSSVSADTVLVPPGKRRRAATAKAGAEPNKRIRKDPAAAAAGKRSSVYRGVTRHRWTGRFEAHLWDKHCLAALHNKKKGRQVYLGAYDSEEAAARAYDLAALKYWGPETLLNFPVEDYSSEMPEMEAVSREEYLASLRRRSSGFSRGVSKYRGVARHHHNGRWEARIGRVFGNKYLYLGTFDTQEEAAKAYDLAAIEYRGVNAVTNFDISCYLDHPLFLAQLQQEPQVVPALNQEPQPDQSETGTTEQEPESSEAKTPDGSAEPDENAVPDDTAEPLTTVDDSIEEGLWSPCMDYELDTMSRPNFGSSINLSEWFADADFDCNIGCLFDGCSAADEGSKDGVGLADFSLFEAGDVQLKDVLSDMEEGIQPPAMISVCN

SEQ ID NO: 201 - protein, 430 aa, Triadica sebifera
MASSSSDPVLKAELGSSGGGCSSGGGGESSEAVIANDQLLLYRGLKKPKKERGCTAKERISKMPPCTAGKRSSIYRGVTRHRWTGRYEAHLWDKSTWNQNQNKKGKQVYLGAYDDEEAAARAYDLAALKYWGPGTLINFPVTDYTRDLEEMQNMSREEYLASLRRKSSGFSRGISKYRGLSSRWESSVGRMPGSEYFSSINYVDDPAAESEYVGSLCFERKIDLTSYIKWWGLNKTRQAESISKSAEETKPGCAEDIGGELKTTEWAIQPTEPYQMPRLGMPVHVKKHKGSKISALSVLSQSAAFKSLQEKASKKQENSTDNDENENKNTNTNKIDYGKAVETSASHDSSNERPVTALGMSGGLSLKRNVYQLTPFLSAPLLTNYGTIDQLVDPILWASLVPVLPTGLSRNPEVTKTETSSTYTFFRPEE

SEQ ID NO: 202 - DNA, 1531 bp, Solanum tuberosum
ttttaaatcattgttttattttctctttctttttacaggtataaaaggtgaaaattgaagcaagattgattgcaagctatgtgtcaccacgttattgatactttggaagaaatttttacttatatgtctttgtttaggagtaatatttgatatgttttagttagattttcttgtcatttatgctttagtataattttagttatttttattatatgatcatgggtgaattttgatacaaatatttttgtcattaaataaattaatttatcacaacttgattactttcagtgacaaaaaatgtattgtcgtagtacccttttttgttgaatatgaataattttttttattttgtgacaattgtaattgtcactacttatgataatatttagtgacatatatgtcgtcggtaaaagcaaacactttcagtgacaaaataatagatttaatcacaaaattattaaccttttttataataataaatttatccctaatttatacatttaaggacaaagtattttttttatatataaaaaatagtctttagtgacgatcgtagtgttgagtctagaaatcataatgttgaatctagaaaaatctcatgcagtgtaaaataaacctcaaaaaggacgttcagtccatagagggggtgtatgtgacaccccaacctcagcaaaagaaaacctcccttcaacaaggacatttgcggtgctaaacaatttcaagtctcatcacacatatatttattatataatactaataaagaatagaaaaggaaaggtaaacatcattaaatcgtctttgtatatttttagtgacaactgattgacgaaatctttttcgtcacacaaaatttttagtgacgaaacatgatttatagatgatgaaattatttgtccctcataatctaatttgttgtagtgatcattactcctttgtttgttttatttgtcatgttagtccattaaaaaaaaatatctctcttcttatgtacgtgaatggttggaacggatctattatataatactaataaagaatagaaaaaggaaagtgagtgaggttcgagggagagaatctgtttaatatcagagtcgatcatgtgtcaattttatcgatatgaccctaacttcaactgagtttaaccaattccgataaggcgagaaatatcatagtattgagtctagaaaaatctcatgtagtgtggggtaaacctcagcaaggacgttgagtccatagaggggggtgtatgtgacaccccaacctcagcaaaagaaaacctcccctcaagaaggacatttgcggtgctaaacaatttcaagtctcatcacacatatatatatattatataatactaataaataatagaaaaaggaaaggtaaacatcactaacgacagttgcggtgcaaactgagtgaggtaataaacagcactaacttttattggttatgtcaaactcaaagtaaaatttctcaacttgtttacgtgcctatatataccatgcttgttatatgctcaaagcaccaacaaaattta

SEQ ID NO: 203 - DNA, 20 bp, Artificial Sequence
  Oligonucleotide primer
cactcgtgctttccatcatc

SEQ ID NO: 204 - DNA, 20 bp, Artificial Sequence
  Oligonucleotide primer
gaaggctgagcaacaagagg

SEQ ID NO: 205 - DNA, 18 bp, Artificial Sequence
  Oligonucleotide primer
ggcgattttggattctgc

SEQ ID NO: 206 - DNA, 20 bp, Artificial Sequence
  Oligonucleotide primer
cccaacccttccgtatacat

SEQ ID NO: 207 - DNA, 1970 bp, Zea mays
ggtaccttttttcccagagataaatgtggaatagctctacaaacaaacggcatgatgctgacacttggatggcgaccttgcaatcccaagaactattgcatacggttgccagtcgacaaatatctacgccatgcatggctacggtcggaatacaccgtagcggcgggtaactcgccgataccgtccacgtgtccttggatgcccggtcgctgatacttctggtcttctggacatgcaccaagacaatcaagtgattcaaccttaatttaacataatataaataatacgtaacatccaactgacgtgttcacctatagagaatattccttctgattctactttcagaatgatgccgttgccgtgtatcgagcaagtactctcactcgaagtatcttatctcccacatccagcacaaaaatcttctgttcgtggcaaatcttgtggcggttgaacgaaagaatgctatataagtagctatagagaacgtattatgtgtaaaccaaccgttcagtgtaaatcgtgtgtaaatagtcatgttaattttttggcggcagatcaagtacaaactgtatgcctcggataaacatgtacaaaccacaacactggccactagatctatatccaacgttcataaccatccatccctctctgctgcactctgcaaacaagcacccccatctcgtagcaacatcttgtctccgacaagctctcgatgtagtggaggccctccaccgcaatatcctagtgtatgatgttggagaagcgactcctaaataatggtggcaagatgttgctaggtttgtagccatagcctcaatctaagatcatcccaagccatgggacctgattctacgaggcctacaaccaggcatgacacgtcgtctacccactcttgtgcatcatcggtcacttgatctgacttggttcctaaccacttaccctaggttccaaagccctaagtttctcgtatattgttagtcattcttagtgggagttttatgtgtatttcattcctgttaaatagcatgccaactaagcaaacatgatgatataatatgcaatctaataaaaagatatatgagtgggtttcataaaaaagggagagagtttcatgaggagtgaaactctgaatacagatactgatatgacagctttaaaagtagtgttatgaaatcatcattgagaaatggtattagcactcaatcgatttctacgctgtcaattgtcatgagcacaattttcacccaaagaggcacaccagcaatgtccgcttgtagtgtccgagacgttgctccatcgccgtcgtcttgtttctgtgcgctccattcaatgcggcaagtggctcaatcccaagcggtcgtcgcctcccagccccagcagcaaaatatcttcccatgcggccatgccttgaaaattggaatagattctctagattcaccgccgcgtcatcttcactactttctcactggcccaatcagcatctccttctccgagctcaatcatgctcagtcaagcgtcaccaatggcgtcacggttggttttgtcactgtctgcatgcaagggtattttgcttcgcaagtgtaaatggaaaatggatctaaacaactgcactgcaccaattttggaacgcggaaccgagagtctgtttgggttcgtttgaaacgcgctgatgtttctcattttttaatagatgtagttacctgatactatttaagttggacgatcaaacgactgtgtcaagtgtgattaagaaaagcatcgaaaataaaatttatcgccataaaaagttaaaaacagtggataatagtaggacctcataatagaaaaaattatcaaacggaatggaggggcccaacgcagtatatagcagccgggtggtgccggacatccgacgctcgtgccagcaggccattcttctcgccttactccctcacagaacccagtaaaatatcgccagtcccgccgtcgag

SEQ ID NO: 208 - DNA, 584 bp, Aeluropus littoralis
cccaagcttgaccgatgcacacgctacctgccaaggctccctccatccgcactctgcatcgtcgcttcggcgtaaacttccacgtagtacttgtacgattctagctagacccagtgcgcccaccctaccgccggcgagcgggcccccatctcgcgccaggcttccatgcgggtccaccgtggaccagccctacgccgaaccgagcccatccctccaccctttcaccgccaagcgggacccgcgttggacctttccgcttggctggcccccaccagcgtccacgcgggccaacggcctcgcgaaatggatctccacacgacaaaccaaaacgagaagaaaataaatggaaaggaaagaaacggatcgccacgcgttccagaggcgtccgctaaccacccgattatgcttgcgcagcgtgcgtaacctcgtcgtggggttaatccgggtggccggatcgggaaagccacggcctttataacccatccctgccggatcgaaccggtaccggaaacaaaaacagggggagaaaaaaagttcttcgcgaggaaggaaaaggaaaagtcgcgtgccgtcctcgcccacag

SEQ ID NO: 209 - DNA, 928 bp, Agrobacterium rhizogenes
ttagcgaaaggatgtcaaaaaaggatgcccataattgggaggagtggggtaaagcttaaagttggcccgctattggatttcgcgaaagcggcattggcaaacgtggagattgctgcattcaagatactttttctattttctggttaagatgtaaagtattgccacaatcatattaattactaacattgtatatgtaatatagtgcggaaattatctatgccaaaatgatgtattaataatagcaataataatatgtgttaatctttttcaatcgggaatacgtttaagcgattatcgtgttgaataaattattccaaaaggaaatacatggttttggagaacctgctatagatatatgccaaatttacactagtttagtgggtgcaaaactattatctctgtttctgagtttaataaaaaataaataagcagggcgaatagcagttagcctaagaaggaatggtggccatgtacgtgcttttaagagaccctataataaattgccagctgtgttgctttggtgccgacaggcctaacgtggggtttagcttgacaaagtagcgcctttccgcagcataaataaaggtaggcgggtgcgtcccattattaaaggaaaaagcaaaagctgagattccatagaccacaaaccaccattattggaggacagaacctattccctcacgtgggtcgctagctttaaacctaataagtaaaaacaattaaaagcaggcaggtgtcccttctatattcgcacaacgaggcgacgtggagcatcgacagccgcatccattaattaataaatttgtggacctatacctaactcaaatatttttattatttgctccaatacgctaagagctctggattataaatagtttggatgcttcgagttatgggtacaagcaacctgtttcctactttgttacca

SEQ ID NO: 210 - DNA, 732 bp, Artificial
  hpRNAi construct containing a 732bp fragment
aatgcagttttacaaagtggagtacccaaagcagatgagatcattttgtataacatggctcttgtgttggatcgtatttttgtggatgtgaaggatgcttttgagttctcaccacatcataaggccattcgtgaaccttttgactattacaagtttggccaaaattatatccgccctttacttgatttcaggagttcttatgttggcaatatatcagtttttggtgaaatagaagagaagctcaagcagggcgttaatgttgttttgatgtcaaaccaccaaagtgaagcagatccagcggttattgctctgttgcttgaatcgaggcacccatacattgctgagaacataatttatgttgcaggagatagagttattactgatcctctttgcaagccattcagcatgggaaggaatctcctgtgtgtttattcgaaaaaacatatgggtgatgaccccaaacttgtcgagaagaaaaggagagcaaacacaagaagcttgaaggagatggctgtgctattgaggggtggatcaaaactaatatggattgctcctagtggtggaagagataggccaaaccctgttacaaaagaatggtatccagcgccatttgatgcttcttcaacagacaacatgagaaggcttgtagaacatgctggtgtccctggtcacatttatcctctagcaatattatgctatgatattatgccccctccgccccaggttgagaaa

SEQ ID NO: 211 - protein, 512 aa, Elaeis guineensis
MAVSKNPETLAPDQEPSKESDLRRRPASSPSSTAASPAVPDSSSRTSSSITGSWTTALDGDSGAGAVRIGDPKDRIGEANDIGEKKKACSGEVPVGFVDRPSAPVHVRVVESPLSSDTIFQQSHAGLLNLCVVVLIAVNSRLIIENLMKYGLLIGSGFFFSSRLLRDWPLLICSLTLPVFPLGSYMVEKLAYKKFISEPVVVSLHVILIIATIMYPVFVILRCDSPILSGINLMLFVSSICLKLVSYAHANYDLRSSSNSIDKGIHKSQGVSFKSLVYFIMAPTLCYQPSYPRTTCIRKGWVICQLVKLVIFTGVMGFIIEQYIDPIIKNSQHPLKGNVLNAMERVLKLSIPTLYVWLCVFYCTFHLWLNILAELLCFGDREFYKDWWNAKTIEEYWRMWNMPVHKWMLRHVYLPCIRNGIPKGVAMVISFFISAIFHELCIGIPCHIFKFWAFIGIMFQVPLVILTKYLQNKFKSAMVGNMIFWFFFSIYGQPMCVLLYYHDVMNRKVGTE

SEQ ID NO: 212 - protein, 74 aa, Glycine max
MADIDRSFDNNVSAVSTEKSSQVSDVEFSEAEEILIAMVYNLVGERWSLIAGRIPGRTAEEIEKYWTSRFSTSQ

SEQ ID NO: 213 - protein, 146 aa, Arabidopsis thaliana
MGSLQMQTSPESDNDPRYATVTDERKRKRMISNRESARRSRMRKQKQLGDLINEVTLLKNDNAKITEQVDEASKKYIEMESKNNVLRAQASELTDRLRSLNSVLEMVEEISGQALDIPEIPESMQNPWQMPCPMQPIRASADMFDC

SEQ ID NO: 214 - protein, 268 aa, Arabidopsis thaliana
MGRGKIEIKRIENANSRQVTFSKRRSGLLKKARELSVLCDAEVAVIVFSKSGKLFEYSSTGMKQTLSRYGNHQSSSASKAEEDCAEVDILKDQLSKLQEKHLQLQGKGLNPLTFKELQSLEQQLYHALITVRERKERLLTNQLEESRLKEQRAELENETLRRQVQELRSFLPSFTHYVPSYIKCFAIDPKNALINHDSKCSLQNTDSDTTLQLGLPGEAHDRRTNEGERESPSSDSVTTNTSSETAERGDQSSLANSPPEAKRQRFSV

SEQ ID NO: 215 - protein, 437 aa, Arabidopsis thaliana
MEFESVFKMHYPYLAAVIYDDSSTLKDFHPSLTDDFSCVHNVHHKPSMPHTYEIPSKETIRGITPSPCTEAFGACFHGTSNDHVFFGMAYTTPPTIEPNVSHVSHDNTMWENDQNQGFIFGTESTLNQAMADSNQFNMPKPLLSANEDTIMNRRQNNQVMIKTEQIKKKNKRFQMRRICKPTKKASIIKGQWTPEEDKLLVQLVDLHGTKKWSQIAKMLQGRVGKQCRERWHNHLRPDIKKDGWTEEEDIILIKAHKEIGNRWAEIARKLPGRTENTIKNHWNATKRRQHSRRTKGKDEISLSLGSNTLQNYIRSVTYNDDPFMTANANANIGPRNMRGKGKNVMVAVSEYDEGECKYIVDGVNNLGLEDGRIKMPSLAAMSASGSASTSGSASGSGSGVTMEIDEPMTDSWMVMHGCDEVMMNEIALLEMIAHGRL

SEQ ID NO: 216 - protein, 359 aa, Arabidopsis thaliana
MYHQNLISSTPNQNSNPHDWDIQNPLFSIHPSAEIPSKYPFMGITSCPNTNVFEEFQYKITNDQNFPTTYNTPFPVISEGISYNMHDVQENTMCGYTAHNQGLIIGCHEPVLVHAVVESQQFNVPQSEDINLVSQSERVTEDKVMFKTDHKKKDIIGKGQWTPTEDELLVRMVKSKGTKNWTSIAKMFQGRVGKQCRERWRNHLRPNIKKNDWSEEEDQILIEVHKIVGNKWTEIAKRLPGRSENIVKNHWNATKRRLHSVRTKRSDAFSPRNNALENYIRSITINNNALMNREVDSITANSEIDSTRCENIVDEVMNLNLHATTSVYVPEQAVLTWGYDFTKCYEPMDDTWMLMNGWN

SEQ ID NO: 217 - protein, 386 aa, Arabidopsis thaliana
MSKRPPPDPVAVLRGHRHSVMDVSFHPSKSLLFTGSADGELRIWDTIQHRAVSSAWAHSRANGVLAVAASPWLGEDKIISQGRDGTVKCWDIEDGGLSRDPLLILETCAYHFCKFSLVKKPKNSLQEAESHSRGCDEQDGGDTCNVQIADDSERSEEDSGLLQDKDHAEGTTFVAVVGEQPTEVEIWDLNTGDKIIQLPQSSPDESPNASTKGRGMCMAVQLFCPPESQGFLHVLAGYEDGSILLWDIRNAKIPLTSVKFHSEPVLSLSVASSCDGGISGGADDKIVMYNLNHSTGSCTIRKEITLERPGVSGTSIRVDGKIAATAGWDHRIRVYNYRKGNALAILKYHRATCNAVSYSPDCELMASASEDATVALWKLYPPHKSL

SEQ ID NO: 218 - protein, 292 aa, Arabidopsis thaliana
MEPPQHQHHHHQADQESGNNNNNKSGSGGYTCRQTSTRWTPTTEQIKILKELYYNNAIRSPTADQIQKITARLRQFGKIEGKNVFYWFQNHKARERQKKRFNGTNMTTPSSSPNSVMMAANDHYHPLLHHHHGVPMQRPANSVNVKLNQDHHLYHHNKPYPSFNNGNLNHASSGTECGVVNASNGYMSSHVYGSMEQDCSMNYNNVGGGWANMDHHYSSAPYNFFDRAKPLFGLEGHQEEEECGGDAYLEHRRTLPLFPMHGEDHINGGSGAIWKYGQSEVRPCASLELRLN

SEQ ID NO: 219 - protein, 453 aa, Brassica napus
MDLGSVTGNVNGSPSLKELRESKQDRSEFDGEDCLQQSSKLARTIAEDKHLPSSYAAAYSRPMSFHQGIPLARSASLLSSDSRRQEHMLSFSDKPEAFDFSKYVGLDNNKNSLSPFLHQLPPPYCRTPGGGYGSGGMMMSMQGKGPFTLTQWAELEQQALIYKYITANVPVPSSLLISIQKSFYPYRSFPPSSFGWGTFHLGFAGGKMDPEPGRCRRTDGKKWRCSKDAVPDQKYCERHINRGRHRSRKPVEVQPGQTAASKAAAVASRNTASQIPNNRVQNVIYPSTVNLPPKEQRNNNNSSFGFGHVTSPSLLTSSYLDFSSNQNKPEELKSDWTQLSMSIPVASSSPSSTAQDKTTLSPLRLDLPIQSQQETLEAVRKVNTWIPISWGNSLGGPLGEVLNSTTSSPTLGSSPTGVLQKSTFCSLSNSSSVTSPVADNNRNNNVDYFHYTT

SEQ ID NO: 220 - protein, 461 aa, Brassica napus
MDLGSVTGNVNGSPGLKELRGSKQDRSGFDGEDCLQQSSKLARTIAEDKHLPSSYAAYSRPMSFHQGIPLTRSASLLSSDSRRQEHMLSFSDKPEAFDFSKYVGLDNNKNSLSPFLHQLPPPYCRSSGGGYGSGGMMMSMQGKGPFTLTQWAELEQQALIYKYITANVPVPSSLLISIQKSFYPYRSFPPSSFGWGTFHLGFAGGKMDPEPGRCRRTDGKKWRCSKDAVPEQKYCERHINRGRHRSRKPVEVQPGQTAASKAVASRDTASQIPSNRVQNVIYPSNVNLQPKEQRNNDNSPFGFGHVTSSSLLTSSYLDFSSNQEKPSGNHHNQSSWPEELKSDWTQLSMSIPVASSSPSSTAQDKTALSPLRLDLPIQSQQETLESARKVNTWIPISWGNSLGGPLGEVLNSTTSSPTLGSSPTGVLQKSTFCSLSNSSSVTSPIADNNRNNNVDYFHYTT

SEQ ID NO: 221 - protein, 409 aa, Arabidopsis thaliana
MEARPVHRSGSRDLTRTSSIPSTQKPSPVEDSFMRSDNNSQLMSRPLGQTYHLLSSSNGGAVGHICSSSSSGFATNLHYSTMVSHEKQQHYTGSSSNNAVQTPSNNDSAWCHDSLPGGFLDFHETNPAIQNNCQIEDGGIAAAFDDIQKRSDWHEWADHLITDDDPLMSTNWNDLLLETNSNSDSKDQKTLQIPQPQIVQQQPSPSVELRPVSTTSSNSNNGTGKARMRWTPELHEAFVEAVNSLGGSERATPKGVLKIMKVEGLTIYHVKSHLQKYRTARYRPEPSETGSPERKLTPLEHITSLDLKGGIGITEALRLQMEVQKQLHEQLEIQRNLQLRIEEQGKYLQMMFEKQNSGLTKGTASTSDSAAKSEQEDKKTADSKEVPEEETRKCEELESPQPKRPKIDN

SEQ ID NO: 222 - DNA, 685 bp, Nicotiana benthamiana
aaagtccactggaagaatactcttcaacagttggaaagagttggacctaagtcggttggtgtctgtctgttaacagcagcttttgttggcatggccttcactatccaatttgttagagaattcactagattagggttaaatagatctgttggtggggtgttggcccttgccttttcaagagagctaagtccagttgtcacatcaattgtagttgctgggcgtatcggtagtgcatttgctgcggaactgggcactatgcaggtatctgagcagactgacacgttgagagttcttggtgcaaatcctgttgattatttggtgacaccaagagtgattgcttcttgcgttgcattaccatttttaaccctaatgtgctttacagttggaatggcatccagcgcccttttggcagatggtgtttatggaattagcataaacataatcttagattctgctctgagagctcttagatcatgggaccttattagtgcaatgattaaatcaggggtgtttggtgctattatatccatcataagctgtgcttggggggtcaccacgctgggaggtgccaaaggggttggagagtcgactacttcagcagtagttttatctcttgttggcatattcatagctgactttgctctctcttgctgtttcttccagggtgctggcgattccctgaaga

SEQ ID NO: 223 - protein, 824 aa, Solanum tuberosum
MDISNEAKVEFISIGPSSIVGRTIAFRVLFCKSISRLRHNIFHFLIYYLYKIKNCLSYYLTPLIKWFHPRNPQGILALVTLLAFLLRRYTNVKIRADMVYKRKFWRNMMKSALTYEEWAHAAKMLEKETPKMNEAEFYDEELVVNKLQELQHRRNEGSLRDIMFFMRADLVRNLGNMCNPQLHKGRLHVPKLIKEYIDEVSTQLKMVCDYDSDEILLEEKLAFMHETRHAFGRTALLLSGGASLGAFHVGVVKTLVEHKLMPRIIAGSSVGSIMCSVVATRSWPELQSFFENFWHVLQPFEQMGGILTVFRRIMRQGAVHEIRQLQVMLRHLTNNLTFQEAYDMTGRVLGITVCSPRKHEPPRCLNYLTSPHVVIWSAVTASCAFPGLFEAQELMAKDRSGNLVPYHPPFHLEPDQAAASGSSARRWRDGSLEIDLPMMQLKELFNVNHFIVSQANPHIAPLLRIKEFVRAYGGNFAAKLAHLTEMEVKHRCNQVLELGFPLRGLAKLFAQDWEGDVTVVMPATLAQYLKIIQNPSTLEVQKAANQGRRCTWEKLSAIKANCGIELALDECVAILNHMRRLKRSAERAAAASQGMSSSTVKLNASRRIPSWNCIARENSTGSLEEDFHADASSSLHHHNAGRNWRCNNKNAAHDHHGSDSESENADNNSWTRSGGPLMRTTSADKFIDYVQNLEMHPSQRSSRGLSIDLNNVVVREPLSPSPRVTTPARRSDTEFDQRDIRIIVAEGDLLQTERTNNGIVFNVVRRGDLTPSNRSLDSENNSCFHDPVAECVQLENPEKDMDISSASEDGENAVLDEVTKNQII

SEQ ID NO: 224 - DNA, 2475 bp, Solanum tuberosum
atggatataagtaatgaggctaaagtagagttcatttccataggaccttcttcaattgtaggtcgaacaatagcctttcgagttttgttttgcaaatcaatatcgcggttgaggcacaacatttttcatttcttgatatattacttgtacaagatcaagaattgtctgtcatactacttgacacctttgatcaaatggtttcacccgcgtaatccacaggggatattagcattagtaacacttctagccttcttgttgaggcgatatacgaatgtaaaaatcagggctgatatggtttataagaggaaattttggaggaatatgatgaaatctgcattaacttatgaggaatgggctcatgctgcgaaaatgttggagaaagagacacctaaaatgaatgaagcagagttttatgatgaagagttagttgtaaataaacttcaagaacttcaacatcgtcgtaatgaaggatctttaagagatattatgttctttatgagagctgatcttgtgagaaatctgggtaatatgtgtaatccacagcttcataagggtaggcttcatgtgcctaaacttattaaggagtatattgatgaggtttcaactcagttgaaaatggtatgtgattatgattcagatgagattttgttggaggagaagcttgcttttatgcatgaaacaagacatgcttttggtaggacagcattgcttttaagcgggggcgcgtctttgggagcttttcatgttggtgtggttaagacattggttgagcacaagcttatgccaaggataattgctggttcgagtgttggatcgattatgtgttctgtagttgcaactcggtcttggcctgagctgcagagtttttttgagaatttttggcatgtgttgcagccgtttgaacagatgggtggaattctaactgttttcaggaggatcatgagacaaggggctgtacatgagattaggcagttgcaggtgatgttacgccatctcacgaataatcttactttccaagaagcttacgatatgactggtcgagttctagggattactgtttgctcccctagaaaacatgaacctcctagatgtttgaactacttgacttcacctcatgttgttatatggagtgctgtgactgcttcttgcgcgtttcctggtctgtttgaagctcaagaactgatggcaaaggatagaagtggtaatcttgttccttatcatccaccatttcatttggaacctgatcaggctgcagcttctggttcatctgctcgtcgatggagggatggtagcttggagatcgatctacctatgatgcagctaaaagagctattcaacgtaaaccactttatcgtgagccaggcgaatccacatattgctcctttactcaggatcaaagagtttgtaagagcttatggaggcaactttgctgccaagcttgctcatcttactgagatggaagtgaagcacagatgcaatcaggtactggaacttggttttcccttgaggggattagccaagctatttgctcaagattgggaaggcgatgtcaccgttgtaatgccagccactcttgctcagtacttgaagatcatacagaatccctctactttggaggttcaaaaagcagcaaatcaagggaggagatgcacttgggagaaactatcagccattaaggcaaattgtggaattgagcttgctcttgatgagtgtgtagcaatactcaaccatatgcgtagactaaaaaggagcgcggagagagcagctgctgcttcacaaggcatgtcaagcagcacagtcaaactcaatgcttctagacgtattccttcttggaattgcattgcaagagagaactcaacaggctcccttgaagaagactttcacgcggatgcttcttcctctcttcatcatcacaatgctggtcgaaactggcgttgtaataacaagaatgctgcacatgatcatcatggtagtgacagtgagtctgaaaacgcggataataattcttggacaagatcaggtggtccattgatgaggacaacatcagctgataagtttattgactatgtacaaaacttggaaatgcatccttcacaacgatcgagcagaggactgagtattgacctcaacaatgttgtagtcagggagcctctttctccgagtccacgagtgacaacacctgctaggagatcagatacagaatttgatcaaagagacatcagaattatcgtcgctgaaggtgatttactacagactgaaaggactaacaatgggattgtattcaatgtggtaaggagaggagacttaactccatcaaacaggagtcttgattcagaaaacaacagttgctttcatgatccagtggccgaatgcgtgcaactcgaaaatcctgagaaggatatggatataagttcagcatcagaagatggagaaaatgcagtactagatgaagtaacaaaaaatcagatcatataa

SEQ ID NO: 225 - protein, 521 aa, Solanum tuberosum
MAASIGALKSSPSSNNCINERRNDSTRAVSSRNLSFSSSHLAGDKLMPISSLRSQGVRFNVRRSSLIVPPKAVSDSQNSQTCLDPDASRSVLGIILGGGAGTRLYPLTKKRAKPAVPLGANYRLIDIPVSNCLNSNISKIYVLTQFNSASLNRHLSRAYASNMGGYKNEGFVEVLAAQQSPENPDWFQGTADAVRQYLWLFEEHTVLEYLILAGDHLYRMDYEKFIQAHRETDADITVAALPMDEKRATAFGLMKIDEEGRIIEFAEKPQGEQLQAMKVDTTILGLDDKRAKEMPFIASMGIYVISKDVMLSLLRDKFPGANDFGSEVIPGATSLGMRVQAYLYDGYWEDIGTIEAFYNANLGITKKPVPDFSFYDRSAPIYTQPRYLPPSKMLDADVTDSVIGEGCVIKSCKIHHSVVGLRSCISEGAIIEDSLLMGADYYETDADRKLLAAKGSVPIGIGKNCHIKRAIIDKNARIGDNVKIINKDNVQEAARETDGYFIKSGIVTVIKDALIPSGIII

SEQ ID NO: 226 - DNA, 1819 bp, Solanum tuberosum
ctagtgattgcaatcacactctaccacacactctctagtagagagatcagttgataacaagctttgttaacaatggcggcttccattggagccttaaaatcttcaccttcttctaacaattgcatcaatgagagaagaaatgattctacacgtgcagtatccagcagaaatctctcattttcgtcttctcatctcgccggagacaagttgatgcctatatcgtccttacgttcccaaggagtccgattcaatgtgagaagaagttcattgattgtgccgcctaaggctgtttctgattcgcagaattcacagacatgtctagacccagatgctagccggagtgttttgggaattattcttggaggtggagctgggacccgactttatcctctaactaaaaaaagagcaaagccagctgttccacttggagcaaattatcgtctgattgacattcctgtaagcaactgcttgaacagtaacatatccaagatctatgttctcacacaattcaactctgcctctctgaatcgccacctttcacgagcatatgctagcaacatgggaggatacaaaaacgagggctttgtggaagttcttgctgctcaacaaagtccagagaaccccgattggttccagggcacggctgatgctgtcagacaatatctgtggttgtttgaggagcatactgttcttgaataccttatacttgctggagatcatctgtatcgaatggattatgaaaagtttattcaagcccacagagaaacagatgctgatattaccgttgccgcactgccaatggacgagaagcgtgccactgcattcggtctcatgaagattgacgaagaaggacgcattattgaatttgcagagaaaccgcaaggagagcaattgcaagcaatgaaagtggatactaccattttaggtcttgatgacaagagagctaaagaaatgcctttcattgccagtatgggtatatatgtcattagcaaagacgtgatgttaagcctacttcgtgacaagttccctggggccaatgattttggtagtgaagttattcctggtgcaacttcacttgggatgagagtgcaagcttatttatatgatgggtactgggaagatattggtaccattgaagctttctacaatgccaatttgggcattacaaaaaagccggtgccagattttagcttttacgaccgatcagccccaatctacacccaacctcgatatctaccaccatcaaaaatgcttgatgctgatgtcacagatagtgtcattggtgaaggttgtgtgatcaagagctgtaagattcatcattccgtggttggactcagatcatgcatatcagagggagcaattatagaagactcacttttgatgggggcagattactatgagactgatgctgacaggaagttgctggctgcaaagggcagtgtcccaattggcatcggcaagaattgtcacattaaaagagccattatcgacaagaatgcccgtataggggacaatgtgaagatcattaacaaagacaacgttcaagaagcggctagggaaacagatggatacttcatcaagagtgggattgtcaccgtcatcaaggatgctttgattccaagtggaatcatcatctgaaggaatgcgttttaacttggttgtcctccaagattttggctaaacagccatgaggtagaaacgtgctgaacttttattttcctgagctgtagaaatctagtgtacatctttctgttatgatacttctcattacccctacaagagaagactggatgctgtaaaaattattcgtctagaataa

SEQ ID NO: 227 - DNA, 1173 bp, Sapium sebiferum L.
tgccaatagccagccaataaaacatctacacgttttcacacggcttttcatcacagccgttgtttttctcatctcactccgtgccttcatcttcatcctcttctcctctctctctgtctctatatgtatagaagcgttagatgtcttgcgttgttaaccaattcatttttcgctttctgcttcttctaatattataagaaagtttgattcttcttcttgtcaatctttgttcgcggcttttaacgatatccgctaaaggaaatttgaaatttcaattatggccgatggaaacgtcaattcgcaagaacagatggctaagcaggaggaacagaggctgaagtatttggagtttgtacaagtggctgcaatacatgctgtggtgaccttcacaaacctctatgtttatgccaaaaacaagtcgggtccattgaagcccggtgttgagactgttgaaggtacggtcaagagtgtggttggacctgtttatggcaagttccatgatgttcccattgaggttctcaagtttgtcgatcgcaagattgatcaatctgtaagcagcctagacagccgtgtgcctccagttgtgaagcagttatcggcccaagcattttcagtggctcgcgaagccccagtggctgctcgtgctgtggcttctgaagtgcagactgctggagtgaaggaaactgcatctgggttggcaagaactctgtacttcaaatatgaacccaaggccaaggagctatacaccaagtatgaaccaaaagcggaacagtgtgctgcctctgcctggcgtaagctcaatcaactcccagtcttccctcatgtagctcaggttgttatgccaacagcagcttattgttctgaaaagtacaaccaggcagtacttaccaccgctgagaaaggatacagagtgtcctcttatttgccttttgtgcccactgagagaattgctaagttgtttaggaatgaggcacctgaatctacccctttcctttccaattgagcaagatgctgataaatgattcacaatggacatgtggacagaataaaaatctttggatattatatggtactgtgtatttcaaggttcaagattactctctacaatgtgtgaatttttgtttcagatgacttaattcttgttcattcattatatatatatatatatatata

SEQ ID NO: 228 - protein, 241 aa, Sapium sebiferum L.
MADGNVNSQEQMAKQEEQRLKYLEFVQVAAIHAVVTFTNLYVYAKNKSGPLKPGVETVEGTVKSVVGPVYGKFHDVPIEVLKFVDRKIDQSVSSLDSRVPPVVKQLSAQAFSVAREAPVAARAVASEVQTAGVKETASGLARTLYFKYEPKAKELYTKYEPKAEQCAASAWRKLNQLPVFPHVAQVVMPTAAYCSEKYNQAVLTTAEKGYRVSSYLPFVPTERIAKLFRNEAPESTPFLSN

SEQ ID NO: 229 - DNA, 1252 bp, Sapium sebiferum L.
ctacttttccctagcattagtattctaggccccactctgtagattcctccagctgcctgatctaattttttatcaactcttgaccgttcgatcatcccaacggctcagattcactagtacttttctcacaccgtatctccgattctccatgactccatcgatataaatcgcagtgctcatcaactgaattctcgaaattgcggttacaagctgctataagaagcgaaaagaaacgctgagaaacaggatccgttcctcctccctcgttttttactccttacaagatggagaccgagaagaagattcctgaattgaagcacttagggttcgtgaggatggctgctattcagtcactgatttgcgtctcgaatctctacgattacgcgaagcataactcaggacctttgagatccactgttggaaccgtggagggtgccgtaaccaccgtagtaggtccagtttaccagaaattcaaagaccttcctgatgatcttcttgtatatgttgataagaaggtggatgaaggaacacacaagtttgataagcatgctccacctattgctaagaaggctgcgagccaagcccatagtttgtttcatatagccttggagaaggtcgaaaaactcgtgcaggaggctcgtgcaggaggacctcgtgctgctctgcattttgtggctacagagtcgaagcacttggcgttgacccaatctgtgaagctgtatagtaaacttaatcagttccctgtcattcacactgttacagatgtaacccttcccacagctactcactggtcagataagtataaccatacccttatggacctgacccggaagggttatacgatctttggttatttgcctttggttcctattgatgacatatctaagacatttaaacaaagtaaagcagaggagaaagaaaatgcaactacgcataaatctgattcatcggattccgactaaacggttgccatcatgtctaatgggtgtggtttgttaagtatagtggtttgcgaaaatgttctagggtttatgagcctgctcgaaagatgctgagaaatggaaatctgtactatttaggagtttttccgtactataataatgagtatgaatggtttgtaaattctgccttgtgctttctcgacaagtatatcatgcttctattttttactactacttactggactactgaattgtctcataattgtccctagtgtctaattaaatatcacctccaaaatattattgaaaaa

SEQ ID NO: 230 - protein, 225 aa, Sapium sebiferum L.
METEKKIPELKHLGFVRMAAIQSLICVSNLYDYAKHNSGPLRSTVGTVEGAVTTVVGPVYQKFKDLPDDLLVYVDKKVDEGTHKFDKHAPPIAKKAASQAHSLFHIALEKVEKLVQEARAGGPRAALHFVATESKHLALTQSVKLYSKLNQFPVIHTVTDVTLPTATHWSDKYNHTLMDLTRKGYTIFGYLPLVPIDDISKTFKQSKAEEKENATTHKSDSSDSD

SEQ ID NO: 231 - DNA, 938 bp, Sapium sebiferum L.
gagtattcacactctggcctgattgggtttgctataaagggcgatcgttgcaacgctccatattgtctacttggttttgtttcaaatctcatcattttgtaaatttgcgacagtgtagcgttttctaggaaaaaggttgctaaaggaaagtagttatcaaaccgcagaaatggcggaatccgaacttaatcaacacacagatatggttcaagatgatgataaaaaactcaagtatctagattttgtacaagtggccgcgatctatgttgtggtttgtttctctagtatctatgaatatgctaaggaaaactccggtccactaaaaccaggggtccaagccgttgagtgtaccgtcaaaactgtaataagtccggtttacgagaagtttcgcgacgtaccttttgaactccttaaattcgtcgatcgtaaagttgacaactctctaggcgagttggacaggcacgtgccgtcgctggtgaagcaggcatcaagccaagctcgagctgtggctagtgaaattcaacatgctggattggtagacgcaactaagaacattgcgaagacgatgtatacaaagtatgaactgacggcttggcagctctactgcaaatacaagccggtggctaagcgttacgcggtgtcgacctggcgctcattgaaccagcttcctctgtttcctcaagcggctcagattgcaatcccaactgctgcttcgtggtctgagaaatacaataagatggttcgttacacgaaagatagaggatatccagcggcggtgtatctgccattgatctcggttgagaggattgccaaggtgttcaatgaagacttaaacgggcccaccgtccctaccaatggatcatccgccgcagcacaatagttttcattttatgtatttatgtcagattgaagacgctccggagattttgaaaacctga

SEQ ID NO: 232 - protein, 194 aa, Sapium sebiferum L.
MAESELNQHTDMVQDDDKKLKYLDFVQVAAIYVVVCFSSIYEYAKENSGPLKPGVQAVECTVKTVISPVYEKFRDVPFELLKFVDRKVDNSLGELDRHVPSLVKQASSQARAVASEIQHAGLVDATKNIAKTMYTKYELTAWQLYCKYKPVAKRYAVSTWRSLNQLPLFPQAAQIAIPTAASWSEKYNKMVRYT

SEQ ID NO: 233 - DNA, 2526 bp, Sorghum bicolor
atggacgagtccggggaagcgagcgtcggctccttcaggatcggcccgtcgacgctgctgggccgcggggtggcgctccgcgtgcttctcttcagctcgctgtggcgcctgcgggcgcgcgcgtacgccgccatctcgcgcgtgcgcagcgcggtgctgccggtggcggcgtcctggcttcacctcaggaacacccacggcgtcctcctcatggtcgtcctcttcgccctctccctgaggaagctctccggcgcgcggtcgcgggcggcgctcgcgcgccggcgcaggcagtacgagaaggccatgctgcatgccgggacgtacgaggtctgggcccgcgccgccaatgtgctcgacaagatgtctgatcaggtccatgaggcggatttctatgacgaggagctgatcaggaacaggcttgaggacctccggaggcggagggaggacgggtcgctgcgggacgtggtgttctgtatgcgcggcgatcttgttaggaacttggggaacatgtgcaatcctgaacttcacaagggcaggctagaggttcctaagcttataaaggaatacattgaagaggtttctattcaactaagaatggtgtgcgaatctgacactgatgagttgctattgggagagaagcttgcctttgttcaggagaccaggcatgcctttgggaggacagccctactcttaagtgggggtgcttcactggggtctttccatgtaggtgtagtgaaaacattggttgagcataagcttctgcctcggattatagcaggatcaagcgttggttccattatatgttcgattgttgctacccggacatggcctgagattgagagcttcttcacagactcattacagaccttgcagttctttgataggatgggtggaatttttgcagtgatgaggcgagtcaccactcatggtgcactgcatgacattagccagatgcaaaggcttctgagggatctcacaagtaacttaacatttcaagaggcttatgacatgactggccgtgtccttgggatcaccgtttgctctcctagaaaaaatgagccaccccgctgcctcaactatctgacgtcgccgcacgttgttatttggagtgctgtaactgcctcttgtgcatttcctgggctctttgaagctcaggaactgatggcgaaggatagattcggcaacatagttcccttccatgcaccctttgccacagatcctgaacaaggtcctggagcatcaaagcgccggtggagagatgggagcctggaaatggatttgcccatgatgagactcaaggagttgtttaatgtaaaccatttcattgtgagccaaactaatcctcacatttctcccctcctccgaatgaaagagcttgttagagtctatggagggcgctttgctggaaagcttgctcgtcttgctgagatggaggttaagtatcgatgtaaccaaatcctagagattggtcttccaatgggaggacttgcaaaattgtttgctcaggactgggagggtgatgtcaccatggttatgccggcaacagtagctcagtatttgaagattattcagaatccaacatatgcggagctccaaatggctgccaaccaaggccgcaggtgtacatgggagaagctctctgcaatcagagcaaactgtgccatcgaacttgcattggatgaatctatagcagttttaaaccacaaacggaggctaaaaagaagcatggagaggacagaggctgctttgcagggtcattctaactatgttcgactcaaaactccaaggagggtaccatcatggagctgcatcagtcgagagaattcttcagaatctctctcggaagagatttcagcagttgctacttcaaccgcgcagcaaggtgctgctcttgttgtcggcacagccactctttctcaccatgttcgacgcaattctcatgacggaagtgagagtgaatcagaaaccattgaccttaattcctggaccaggagtggtgggcctctaatgaggacagcatctgctgacatgttcatcagtttcatccataaccttgagattgacacggaattaagtaggccctgtactgtggagggtggtactgcaggtatttcgtcagaatctaccttcccaaatgatccacaaccgaacaatggctcaagtgttactactccaggtagatgcacagaaaattctgagaccgaggcatacgacactgtcaacaccagagccagtcaggcttctactcccacaagcatcgctgtttctgaaggagatttgctgcagcctgaaagcattgctgacggtatcctgcttaacattgtgaaaagagatgccttgcaggctcaaaatgacagcgtaactgaattggccgaaagctcctgcactgaaacatatgcggaaacttgtgacaccatctcagggtctggcactgctgaagataacaaggatactgctgactcaagcaatcactcacttgatattgatgcttttgtagtttcgcatcaaccttcagctgatgattag

SEQ ID NO: 234 - DNA, 3099 bp, Triticum aestivum
atgcccgcgcctgcaggtgcgtgcagccaagccccaccgctcgccttctattccgcgtcccctagcttggcccggccctgctccgatccaaggccgcggcggtggcccagtgccctctccctcctgccacgccgtccgccgcccatggacgtcatcaccaacgaggcgcgcgtgggggcgttcgcgatcggcccgtccacggcggcggggcgcgcgctcgcgctgcgcgtgctcctctgcggctcgctggcgcggctgcggcaccgcctcgccgccgcgctgcgcgccgcggcgccgctggcggcggcctggctgcacccgcgccacaacacgcgggggatcctgctcgccgtctgcgccgtcgcgctgctgctgcgcggccgcgggggccgcgccggggtgcgcgcgcgggtgcagtccgcctaccgccgcaagttctggcggaacatgatgcgcgccgcgctcacctacgaggagtgggcgcacgccgcgcggatgctcgagcgggagacgccgcgccgcgtcaccgacgccgacctctacgacgaggagctcgtgtgcaacaagctccgtgagctcaggcaccgccgtcaggagggctcgctcagggacatcgtcttctgcatgcgcgccgatctgctcaggaaccttggtaacatgtgcaaccccgagctccacaagttgaggctgcaggtgcctaaaaccatcaaggagtacattgaggaggtatctactcaactgaaaatggtttgcaattctgattcggacgagttaccccttgaagagaaactggcatttatgcatgagacaagacatgcctttggtagatcggccctactgctaagtggaggtgcttcatttggctctttccatgtgggtgttgtgaaaaccttggtagagcataagcttctacctaggattatttcaggatcaagcgttggcgcaataatgtgtgctattgtagccacacggtcatggccagaactagagagtttttttgaggagtggcattccttgaaattctttgaccagatgggtgggatctttcctgtatttaaaagaattttgacgcatggagcggttcatgacattaggcacttgcagacgcagttgagaaatcttacaagcaatttgacatttcaagaggcatatgacatgactggccgggttctcgttgttactgtgtgttctccaagaaaacatgagccaccacgatgcctgaactatttgacatcacctcatgttctcatttggagtgcagtaactgcttcctgtgcttttcctggactttttgaggcccaggagttgatggccaaagatagattcggagaaacagttccttttcatgctccattcttgttgggtgtggaggaacgagctgacgctgctacacggcgctggagagatggcagcttagaaagtgatttacccatgaagcaattgaaggaattattcaacgtaaatcacttcatagtaagccaagccaatcctcacattgctccattactgagactaaaggagatcatcagggcttacggaggcagctttgctgcaaagcttgctgaacttgctgagatggaagttaagcataggttcaatcaagttctggaacttggatttccattaggaggaatagctaagttgtttgctcaacattgggaaggtgatgtgacaatcgttatgccagccacacttgctcagtattcgaagatcatacagaatccttcgtattctgagcttcagaaagccgcaagtcagggtaggcgatgcacttgggaaaagctctctgctatcagggcaaactgcgctattgagcttgcattagatgaatgtgttgccctcctgaaccacatgcgtaggctgaagagaagtgcagaaagagcagctgcttcacaaggatatggtgctacaattagactctgtccatctagaaggattccatcatggaatctcatagcaagagaaaattcaactggttctctcgatgaggaaatgctcacatgtcccactgttacgagccatcaagcagttggagggactgctgggccatctaacagaaatcaccatctccaacatagtatgcatgatagcagtgacagtgaatctgagagtatagacttgaactcatggacgagaagtggtggccctctcatgagaacagcctcagctaataaattcatcagctttgttcagaaccttgagattgacacagaattcagaacaatttcaccaagggggagcgaaggtgatattgttacaccgaatagtaacttatttgctggtcacccaattggtagagagccagttgataaccatccagggcctgctactcctggtaggacctcaggcaattcaggttgcgatcctcatgatactcctgttcctaggtctccatttggtctttccacaagtatcatggtccctgaaggtgacttgctgcagccggaaaagattgagaatggtattttattcaatgttgtgagaagggatgctcttgtagcgactactagcggagttgaacctcatggatcttcacaggaagcagatgtggaaactgtaccgaccgagtgcctttatggtgcttcggatgacgacgacgacaacgtggaactgaatgctgatcatgaagcattatctgaccctggagatcagagatcctcagttgcaggaaacctagatccgtccacttccatggattgtcaagctgatgaaacaagtactactcgatcagaagctccatctctctttaatatctgtgtggagattcctccagcaaccatgatcagagaaaatagtcggcccgacgagccttcttcagacataagactggagattgtaaagacagaatgccctgatgagaattcagctgctgggaacgatgaagttggctcagttcctgccaataaagaatcttcctattgttctcagacagctgaaaatagacagcagcatcaagttgatatgggatctgtgaactcctgtagtgtttcagtttcagaagatgataggcatgtcagcctcatttcgaacgagaaaccagttactacttccagtggcggagcggagagtatgacatctggaagaaatgaagctgactag

SEQ ID NO: 235 - DNA, 2198 bp, Artificial Sequence
  S. bicolor SDP1 hpRNAi fragment
gcggcggcgtggctgcacccgcgcgacaacacgcgcgggatcctgctcgccgtctgcgccgtcgcgctgggtgcagtccgcctaccgccgcaagttctggcggaacatgatgcgcgccgcgctcacctacgaggagtgggcgcacgcggcgcggatgcttggagtgcagtaacagcttcctgtgcttttcctggactttttgaggcccaccatctaggaggattccatcctggaatctcatagcaagagaaaattcaactggttctctatgtgcaatcctgaacttcacaagggcaggctagaggttcctaagcttataaaggaatacattgaagaggtttctattcaactaagaatggtgtgcgaatctgacactgatgagttgctattgggagagaagcttgcctttgttcaggagaccaggcatgcctttgggaggacagccctactcttaagtgggggtgcttcactggggtctttccatgtaggtgtagtgaaaacattggttgagcataagcttctgcctcggattatagcaggatcaagaagggtggacccagctttcttgtacaaagtggtctcgaggaattcggtaccccagcttggtaaggaaataattattttcttttttccttttagtataaaatagttaagtgatgttaattagtatgattataataatatagttgttataattgtgaaaaaataatttataaatatattgtttacataaacaacatagtaatgtaaaaaaatatgacaagtgatgtgtaagacgaagaagataaaagttgagagtaagtatattatttttaatgaatttgatcgaacatgtaagatgatatactagcattaatatttgttttaatcataatagtaattctagctggtttgatgaattaaatatcaatgataaaatactatagtaaaaataagaataaataaattaaaataatatttttttatgattaatagtttattatataattaaatatctataccattactaaatattttagtttaaaagttaataaatattttgttagaaattccaatctgcttgtaatttatcaataaacaaaatattaaataacaagctaaagtaacaaataatatcaaactaatagaaacagtaatctaatgtaacaaaacataatctaatgctaatataacaaagcgcaagatctatcattttatatagtattattttcaatcaacattcttattaatttctaaataatacttgtagttttattaacttctaaatggattgactattaattaaatgaattagtcgaacatgaataaacaaggtaacatgatagatcatgtcattgtgttatcattgatcttacatttggattgattacagttgggaagctgggttcgaaatcgataagcttgcgctgcagttatcatcatcatcatagacacacgaaataaagtaatcagattatcagttaaagctatgtaatatttgcgccataaccaatcaattaaaaaatagatcagtttaaagaaagatcaaagctcaaaaaaataaaaagagaaaagggtcctaaccaagaaaatgaaggagaaaaactagaaatttacctgcacaagcttggatcctctagaccactttgtacaagaaagctgggtccacccttcttgatcctgctataatccgaggcagaagcttatgctcaaccaatgttttcactacacctacatggaaagaccccagtgaagcacccccacttaagagtagggctgtcctcccaaaggcatgcctggtctcctgaacaaaggcaagcttctctcccaatagcaactcatcagtgtcagattcgcacaccattcttagttgaatagaaacctcttcaatgtattcctttataagcttaggaacctctagcctgcccttgtgaagttcaggattgcacatagagaaccagttgaattttctcttgctatgagattccaggatggaatcctcctagatggtgggcctcaaaaagtccaggaaaagcacaggaagctgttactgcactccaagcatccgcgccgcgtgcgcccactcctcgtaggtgagcgcggcgcgcatcatgttccgccagaacttgcggcggtaggcggactgcacccagcgcgacggcgcagacggcgagcaggatcccgcgcgtgttgtcgcgcgggtgcagccacgccgccgc

SEQ ID NO: 236 - DNA, 22 bp, Artificial
  Oligonucleotide primer
ttttaacgatatccgctaaagg

SEQ ID NO: 237 - DNA, 23 bp, Artificial
  Oligonucleotide primer
aatgaatgaacaagaattaagtc

SEQ ID NO: 238 - DNA, 22 bp, Artificial
  Oligonucleotide primer
cttttctcacaccgtatctccg

SEQ ID NO: 239 - DNA, 25 bp, Artificial
  Oligonucleotide primer
agcatgatatacttgtcgagaaagc

SEQ ID NO: 240 - DNA, 18 bp, Artificial
  Oligonucleotide primer
gcgacagtgtagcgtttt

SEQ ID NO: 241 - DNA, 25 bp, Artificial
  Oligonucleotide primer
atacataaaatgaaaactattgtgc

SEQ ID NO: 242 - DNA, 23 bp, Artificial
  Oligonucleotide primer
acagacatgtctagacccagatg

SEQ ID NO: 243 - DNA, 24 bp, Artificial
  Oligonucleotide primer
cactctcatcccaagtgaagttgc

SEQ ID NO: 244 - DNA, 25 bp, Artificial
  Oligonucleotide primer
ctgagatggaagtgaagcacagatg

SEQ ID NO: 245 - DNA, 21 bp, Artificial
  Oligonucleotide primer
ccattgttagtcctttcagtc

SEQ ID NO: 246 - DNA, 2631 bp, Saccharum hybrid
ctgcgacagctagaggcgccaccgcgtcctagcttcctccaacttctcgtcggagatcccttcagggatgcccaatgccaccgcccctaagtcaacctgcgggagctggagcttcgccagggtcagagctgcggcagcaccctggtagaccgcattcctgatgacccgcggggtgcgctccatgaagaagtgcattcgcccaaccaagtcgagtgggtcgcctggagggggcggggaagcaaaacgttgcatgcacctagcgccctggcagcgagctcctgtagtatcacctgcgtcgcctccagctcatgctcgcaagcctccagggcggcccggcagtgctccaacactttcgcctcctcctacagctccttccacatgcagtcgtgctccgcacgcaccttctccacctttttactcttttctttctcttttcttggcccatctttggtattttcacaaatgtccccctacaaatgataaatcaccaaaactcatggagcttgctagttataaactctaattctaagtttggtgtttatttgagtggattttgtgtgaaagttggtggttagaaataggagttaaggaccgccaacaagatcccccacacttagccctttgctcatcctcgagtaaagttcaaggactaaggtggaacatctcctcaaatggtacgatgcctgcatataagttattccaagcctcacctatacatgtgaactttgaagtgtctaccacgccatcttgggtggttgagaaatggaacagatcagaatccagtcatctttacctctcttgcttagataacttgggtttttgtaaggttttcaaatttaaaacatagtcttgctcctcaaatgattctctcatatagctcaatgtgtatggtttctcaccaaggcaatgttttgcctcttttcatcctacttctaatatttcttttgtggagcttagggtagggaatgaaaaggaagcatacttgcattgcatatgttactaagtcaaaaaccaaatctgaggagaagcaagtcatacaatctgatcaagatgtgcaagtgtgtggatatgtggattaagataactcctgtttattcatgctctcctccttaataaactttagagggcatggcaatctttgcatgggccttcatgagctcatcgtatgtctaagcatggagctcatcatttatataagcatggtgataccaaaattactccttttgagcatgtttatatttaggaggacgttttacctgttgaggtaaatctgaacgctaataaatcggctaagcaaaataatttatcacctgttgattctaacaatttgatgatggacaatattgatgaggtgactgacaaatgattgaaggctttaaaggagattgagaaggataaatctacaataaaaatgtaaagaagaaagcattcaaagtgtgagatctggtgtggaagactattttgcctcttgggggtaaaagacaacaagtttagtaagtggcctcaaaattgggagggcccatgcaagattgttaaagtaattgttttggattgacggaggcatttcaaggtgatcatctacctagagctctcaatgggaggtgctcgaagacatattacccatgtgtatggcaagatgtttagctagtaactgactgatagtgtaaacgatctccaatggggcaagacatattacctaaggccaggctggtttttgcaagttcgagtaggatatagagattctcgtgcgagttgtaaacgatctccaatggggcaagacatcctaccctatatatagtgaaggggcagtagctgattgagaatcaatcaatcaagcacaatataatttattaattttttattcaaacccaatttttttccttttccaaccctaattatagttttccttttgcctctaggacaaattgacgtgttccgggtatcctgctgaattaagaacaaccctaggtgcacctgtcccgatagagtcccacctgggtaggcattcatagggattcgtgtatttcctgcaaaaaagcgattaagctggcttctaaaactggctaggccggattctgtggccttcactaccaggtgattttcatgtgatccgtgcattctagcactttgctatgtaacccaaacttaagtcgacaactataaatatgctacttgcaggatgttatcacgacacaactcctaatctacggaagcctaagtttagttttgctcggagacaagcaattgtggccagtcactatagctacgtcagagggtagtgggagcagttgcgtcgttggattgaaaacaggtggatcgtatcagatattatgcattcacatggacagtaaatgtggtacagtaacttcgcaaacaataaaatctgtcacaatttattagtgcactcctctgacgtaaatgcttctacgtcagaggatttgattccgagggccgctgcacccatcactaatgacggtctttacccatcatcatggaccattgttcacatccatgctatcactgtcgtcctgtccatgcactgcagccctctataaatactggcatccctcccccgttcacagatcacacaacacaagcaagaaataaacggtagctgccataactagtaca

SEQ ID NO: 247 - DNA, 2907 bp, Saccharum hybrid
gcataggcattgtaaaagcggtatgcctcttcttcagtgcagaatttcataccaaccttaggtatcctgtcttccatagaattttctacctgagtaggttcggtctggttggatttgtagcgggtttcatgcaaaataagttagaaatcgtgcaaacttgcaatggaggttaaatttgaaatatatttgcatagacaaaacaaatatagattatgaatggtaatccaatatgacttgcattttctaactctattgctactgtgccagatgaagaatgttgatctggagaagttttgtgagaatgtgacaacaacgggaggtcatatcaagattctgggtacccgcggagaatcggcctccatgtagttagcctcgtcaggcatggggggaattggctgagatgcccccatgtagtcgtcaggcatggagagtactggctgagatgccattgttgtgtagatcgagagaaacgagaagaatgctagtctaataatacccttccgtatgctaaccaactattataattggcaccatttttcacatgctagcgccttttgcctgctttatttaattcaattgggtccgataagcatgtgaacgtgggagacggttccgtcggacggctccgttttcttgtagcgtacggcgtggacggagaaaaggtgagggcctatctctaaaggggaacgaatggatggtggacacgtgtggggagacaccgaagggacatgccgaggaggcacacaagcttcagcaggcgtctccagactctcagaagaagaagaagctcacggcacggttgcggctggttcttgctgtcgctgtctcgtggtgcacgtttctgtgatcacgctgaaatcgaccggccggcggaccaacaggaggtcagctcggccactccgtctccgagcgcatgagtgcaccgttcgtccgcggttccttttctcgtggtgccgtgcacgcctctgcgttcaccggcaccctgaaaccaatcagaacgttccctttacaggggaaagggacaagtctgataacctctctgtttccatcgtcctctaaccgcgaagagcggacgcacaagacttagagtctatttgttcgaaattttttactctcacaaaagctagcttttatagacgggcataaaagctatcatgtcgaccggcacgtttaatatttaacttataccatatgaatatcatgtcgaactatgaggatgatacttttctgaacgtgattgcgtgagttattaaattgtacttttagttgtttgagcatgaaggtctgaactatgaatttatgatgtattgtggcttgtgagctactccgctctacatttagttggtatcataaatattattatattatcatataaatttgatcaacttgagatgctttgactcttcaagattcttggaatgacttatcatttggggtagggagtaggtttctaaggccagtctcagtggggtttcatcagagtttcatggacattaaataagctgatgtgacaccgtattgatgaagagagagatgataagagtttcatgcgagtagagagagtttcatggggatgaaactcttcttcactgtttccaaaatatagatgcattggtaagagggccatgaaatctctagtgacactgacctaagatgagattgactctagcactatgtttcaaaatctgcatgcatgcatgctttgaatattgtaacctcacattaactcccctcacacatgcatgcaaacgggcggtgcacgcaaaagaattgagtgaagatgcacatgaaaaataagtaaaatgctttggcttcatcacccggcttaaatgctcgacagaaaaacacgtcggtagtcaaggttgtgcctaacaaactggggttcacatgtaaaacacgttcatgccttagaaacggcctggagggattagatacaacttcaattatatcttagggcccctccaatattgtcagctctaaactagttttatgtgtcacggtggaggagagggaggctaaaaatataatcttgagctaacgtgaagagaagagctatttttttttgctccccaatacatgatagatacaatatgagagaaaaaatatatgaataaagaacactttacatgccagccatacaatatgagatttcatctaagagccaacacctgactcgtactgttgaaggtgtcctagttggagtggtcgatcttttagttgttagtagtgtaagacctagtttagtgctcttttcttgtctaggtttatgttgtgttttggctgccaagtgttgaacaactcaaggtaaggtcccatctaattctaaaatgatgccaaataaagatagattacaaagttaaacgacggaaaaactctaaaataggatggaaagttttgtagagtaataattggtatgaagtggcgaagtcgaccacaaccaaacataaagagttaaatgcatggtaggctcttgatcttgtctggaggtgccacttaggtccacaaactctcaaattgcatttttgacaccctaatgttattcaagtgtgccacttagatctacaaactctcaaaatgcatttctgataccctagtgttgttcaagtgtgtcacttaggcaagaaaagttagataattttgataagctatgggaccaaattaatttatgtatgcatgctcgaactagttgatgatgatggaccccataatagacactagttcatgggctggtttccttgtatagtactagctagtataactttttcaagttgtagctactactttagcttatactccgcatattacaatcaaatagaattcggaagtactataaacgggagcctataaatggagacgttttgcatcatgaggctataacaacttgagcaaaaacagaagccgtgcgcc

SEQ ID NO: 248 - DNA, 1141 bp, Saccharum hybrid
actatagggcacgcgtggtcgacggcccgggctggtctggttttggcctcttttagttactaaattgccaaaaagagtgactaaaaagtgactaaactgatttagtcctctagtcaagggactaaaccagctaaaagacatccgctgcccctcattaatgcacagaaggagagagagagggagagggaggacattttggtctttatatagtagctttaatggactttagtacctagatccaaaccggtagtgactaaagtttagtccttgaactgaactttaatccagggacatggaaccaaacatgcccttaacttttttttattctaatccctcttacattcacttgtctcacaaagtggcaagtcatttgccaccctcactaccagtggcgactggttaaatatcctcatgtttggttttttttagtaaccaaatactgcaagctattgggaaaaaaggcaaaaaattatctccttgcttatagttgtataatccatgatccggcaattgtttgttacggagatcctgaatcctctgacgtagagtttaatcaattttagctcaagaataatacactataaagtggatatgacaatcaccgtagtacttatttatcttgtagtagtatactgtattcgacctgcgattatgataaaggcatcagaaactagagtactttctagaatctttagtcagtttctgtaagatgaacgtgactaggaaacttatactgttgcaatcctctgacattctctgattgaaactcggtttccaaaaatcatatgttactaaacaaaacatatctaaccaaatactatgtggtagtgtagatttatatgctgtgtactgaaagtgacgtcaagtatagtagtggcagagactcaaaagatacctgcggattctgaataccacaaccataaaaaacaggatgatgttatacttgtccccttccatgatacaggactgtttagtaatttcccaaacagcccataatacattctgcaccctttattaaacctctactagctacaacatcttactccatcttgtctagttggacaagttctctctttcttggctgactccaacttactacaccgcaacttcttgtgcccttgttccaaccatcacaattgag

SEQ ID NO: 249 - DNA, 4438 bp, Saccharum hybrid
aagtacaaacgtagactctgacatacacgcacgtagactctgacatacacgcataaacgaacgaagaatgttattatttatgttttgagtgggaatatttggtactgctatgattcacgtgtgtaaggaaggattcaagaagaaaggatgcgtttagttcgcgaaaatttttgacttttaccactatagcactttcgtttgtatttgttaattagtgtccaatcatggactaattagactcaaaagatccgtctcgtggttttaaaccaaactgtgtaattaattttttttatctatatttaatgctccatatatgtgtcaaatattcgatataacgaagaatcttgaaaatttttaggaactaaacatggccaaagtgttgtcccgactgagaaactttggaagcagaataaaggctcaaaggaacatttaaaagaagaggatgatatataatcaaaagtggcgacaaagaagtgtgtacgacccactcgagattgacgaaggacagcttctttgttcttttgtgtgttactgaatatgtaataatcttgtatagattggtttttaaaatacggtggcaaattaaagacgatatcacttacaaagacatggacaatgtggaggggccaaaagttatataaacgacacgccgaatcggtgatgaacaccacatgcctcccataaagacggtgtatcaatctttgatataatgggtatccgtttgaggcggcatttatacttgatctagtgaaattacaaggagaggaaaagaagtttaagagaatgataatgataatgaaaaaaatcggaggaaaaagaacatgaacaaagcaagaggagatagccgtgcacacaaaatagagataatttcctcttagaactatgaaaacttcctcttctttctgcaacactgatttgagtttttgttctctatctagcatttcagtccatcttgatgtcaagtgacatgtaaaaagacgtattgcccccattgctgttttaaattgtctccacacttgacaacaatttaatgagttgttaaaatattatgtgtgtttatggccaattatactttttagttttgagtttttcatgaagtcattaagatgctaaaaataatataaagttgtcaatgcttgtcggaagccccaatatgtgactaaaatgctgctaaaagtttatagcatttttttaaaaatctaaacaaattgaaaaaagaaatccaaactagaaattgtagatcttatcgaaaactataagttttatataaaaggcgactttatctaacaccacacaagaaagatgtgctttttctaagaagacaagtcttagtatgtgattaatatgctactgaaaatttatattatttttaagcattttaataacctcaaatggaaacatacaaaactaagttgcagatcttatcaagagctataatttttatataaaatgtatatttaaataacaccatacaagaaagatatatgattttttctaagacgacaaagctttgtatgcaatttaatatgttgctaaaaaatcatattattttttttatcatcttaacgtcctcaaataaaaaaaaatcagactagttggtatagacctcatcgaggctacaatttttataaaaactcaacttcatccggtgttgtataaaaatgatataatttttcctagatagagcgttgccataagtgtattttggtcaagaaatatatgtatacttattaatgaaatcctaacaaaatatactttaaaatctgacggaaatgttggataggaaacaaaagcttaaatcaatgctaaatagggaagttttcatcatagttataatgagtgatttctccacaaaatatgatgtaccacatgttaaatattactcgcgcacaaataatcagagcatattactttcatagcgtggtcgtggccatggcctagacttggttgtggacgtctcacttcaccaattgatagaaaaaaaacatttataagaaagaaaagatacagaaaccatcacacgcgacaacatgacttgccgaaacacaaaaccaaaacccaaactcgagaagatgctttcgagaaaaagcctgaaaagaaaaaaaatttgcacgtaaaatcaaattcggacggcgaagagggcaaacgagacagacaactgggtccacttgctgataaaaaagagagagaggagggcccacttgccggcgggcacccctcagactgtctccaacaatactgacgcaaacagaagacgcattggatgcaatgcgttgcgctgtggcaaaaaattaggtacctatttctagtgtattccaacagagaacgcaaaagaagatgccgtactgcgccatgcattcatgtgggaccggggaggatgcgggcaacagcagtttgcacgacccattggccggagcatgcgacgtatatttgcgttgcgcctcgcttcctacgcaaaatgtgtcgttggtatgcctaccctgttggagggcgttttcttctgctaaagtaacgtggagcacgcatttgcgtaggctgttggagatagtctcaccacgcggtgaccggaccaggccaattcccgagcccaaaaagaaaaaagcacacacacagagacacacgctctcgctctcgcctccctgacgctggatttaagcagagcagggagcagaggtgcaaccgcccaccacgatctcccctcccgcacgccccgcgggcagacccagccaaggcaaggcagccgcgaaccggagcacgccggccggtgtcgcctcccgcgccggcggcctgctgctcgctcgccctcgcttccgcattggatcacgcggcggttggcgacttggtggtgtctgctgctggtgattgcgcctagccggccgacgcggagacggtgaggcgctgctcttcgcttctctccccactgctcccctcagcggtttctctctccctgttatgcgtggaggagccctgcccccgcggaacggaagcctccgccggatctctgttacgccgcggttactgcctcgccctggatttgaacttgtttcgtaattttcccttgctgcgcttctcgatttcggggaggggttctgccggcagctctgccgctccacctgacttggggacctttctatgttccgcgacagcagcattgatgatctgcttgtctcttgagtttttttttcgtgcgatgcatcgagcgcgtggggacacgatcacgcctgatgggcggtagtccgcgatccgcatttctgaatcccggcgcctagccgaggtgcctcggtgcttcctggttgccttgctgctattcccttcttcggatccgctctcgtacggctggcacggtggttgcggccttagaatttcgtggcggcggtttggttggattggtgatgctgctccgtccgcatttatgaaggaatgttctccaaacttttaagctgctcgtgtactcggagtattgaattgcctgttccttgccgctataggaggccctgggccagcctaccccgctttgggttgtgattggtgatttccggcagctgttattgtttcatgattcgtgtggggaaaaaaagtttttttggttcacgagtggtttctggtgcatgttttgacaagttttctatgatgctggtactgtctttacccctgctagagtagtttggtggtgcgttttcctattaggtgggaatttaatcactttcccactttatcgtatctctactatggtaaccatcttttggcaattttgattggtatagtcatgtttaagataagcttttgaattcaatgatcttgccgttcattagctagcacttaattttgtagagctgcttggatcaccaaagtgccgctcaatcttgttcaagtgcctatgatatatgggattctgatggaactcttagcagtcgtgtccttaggcagtcggcaccttgataaggttccaagagttcaatcttacggaagaaatagtgagcttgatctgagttcagatcggttgtcttcacacttcacgattaattaccacgtttttaaggtgtgcattctcacttctttacttccatcgtcaatcttcttaactggttgggttggaggtgtggtcatgcacccaaccacataggttgagtcctcttcaactcgaatttaggtgcctatttttttcttaataaaaaaggccacctgattctccttggttggtcacatttttttcttaataaaaaaaggccacctcaatgtttctccttttagcttgagcactttttctggatctcctctttcttcttaattctgatccaagtgtcatcagcgttatatttatttgaacctgcttgcttttgtaagcctgatcagtttgcaaaagttactagaacaatttaaccatctgtgcttgttatttctgcaggcatcaagtttctaacaatttgaagtacctaaa

SEQ ID NO: 250 - DNA, 297 bp, Sorghum bicolor
atggtggtcagcgcattcactggacccgggattgggatcgggttcggtgtcggctgcgggttcggcgtcgggtgggggttcggagggatgcctcttaacatgtttggcttgggtattggtgggggctgcggagttggtcttggactaggatggggctttggaaatgcttttggttgtcagtatcgatcttcaagagtccagttccagggcattgaatttcagaagaaggttgaaggagatgaagcaccaaaagttgtttcacaggagcttgctgaaaaatctcgtccttatggctag

SEQ ID NO: 251 - protein, 98 aa, Sorghum bicolor
MVVSAFTGPGIGIGFGVGCGFGVGWGFGGMPLNMFGLGIGGGCGVGLGLGWGFGNAFGCQYRSSRVQFQGIEFQKKVEGDEAPKVVSQELAEKSRPYG

SEQ ID NO: 252 - DNA, 297 bp, Zea mays
atggtagtcagcacgttcaatggacccgggattgggatcgggttcggtgtcggctgcgggttcggcgtcgggtgggggttcggaggaatgcctcttaacatgttcggcttgggtatcggtgggggttgtggatttggtcttggactaggatggggctttggaaatgcttttggttgtcagtatcgatcttcaagagttcagttccaaggcattgaatttcagaagaaggcggaaggagatgatgcaccaaaagttgtttcaccggagcttgctcaaaagtctcgtccttatggctag

SEQ ID NO: 253 - protein, 98 aa, Zea mays
MVVSTFNGPGIGIGFGVGCGFGVGWGFGGMPLNMFGLGIGGGCGFGLGLGWGFGNAFGCQYRSSRVQFQGIEFQKKAEGDDAPKVVSPELAQKSRPYG

SEQ ID NO: 254 - DNA, 1533 bp, Sorghum bicolor
atggcgacggcgatgggcgcgttggctgccacctccctgaccccggtcccggctgccgctacgttccccggtgatctcggcctcggacgccgccgggcggctgtgtcagggtggcgcgccggcgggagacggctgcgtgcgtcgccgcctgcccggaggccgttcctgttctcgccgaggggcgtttcggactctcggagctcgcaaacgtgccttgatccggacgccagcacgagtgttcttgggatcatccttggaggtggtgctgggacaaggctgtatccactgacgaagaagagggcgaaaccagcagtgccgttgcgcgccaactacaggctcatagatatccctgtcagcaactgtctgaacagtaacgtctccaagatatatgtgctaacacagttcaactctgcttcgctcaaccgccacctctcaagggcctatgggaacaacattgccgggtacaagaatgagggattcgttgaggtccttgcagcacaacagagtccagagaatcccaactggtttcagggtactgcagatgctgtgcgtcaatatatgtggctatttgaggagcacaatatcatggagttccttattctggctggagatcacctgtaccgtatggactaccaaaagttcattcaagcccatagagaaacagatgctgatataactgttgcagccctgccaatggatgaacaacgtgcaactgcatttggtcttatgaaaattgatgatgaagggagaatagttgagtttgcagaaaaaccaaaaggagagaagctgagatcaatgatggttgacaccactatattgggccttgatcctgagagggccaaggaactgccttatattgctagtatgggaatctatgtttttagcaaagatgtgatgcttcggcttctcagagaaaactttcctgcagcaaatgactttggaagtgaggttattcctggcgcaacagaaattggattaagggtgcaagcttacttatatgatggttactgggaagatattggtactattgaagcattttataatgcaaacttgggaataaccaagaaacctgtaccggattttagcttctatgaccgttctgctccaatttatacgcaacctagatacttgcctccttcaaaggttcttgatgccgatgtgacagacagtgttattggcgaaggttgtgttattaaacattgcacaatcaaccattctgtagttggactccgttcctgcatttctgaaggtgcagttatagaggattctttgctgatgggtgcagactattatgagactgaggatgataagaaagtcctttctgagaatggtggcattcccattggtattgggaagaatgcacatatcagaaaagcaataatcgacaaaaatgctcgtattggagaaaatgtgaagataatcaattttgataatgtccaagaagcagtaagggagacggaaggatactttatcaaaagtggcattgtcacagtgattaaagatgccttaatccctagtggaaccatcatataa

SEQ ID NO: 255 - protein, 510 aa, Sorghum bicolor
MATAMGALAATSLTPVPAAATFPGDLGLGRRRAAVSGWRAGGRRLRASPPARRPFLFSPRGVSDSRSSQTCLDPDASTSVLGIILGGGAGTRLYPLTKKRAKPAVPLRANYRLIDIPVSNCLNSNVSKIYVLTQFNSASLNRHLSRAYGNNIAGYKNEGFVEVLAAQQSPENPNWFQGTADAVRQYMWLFEEHNIMEFLILAGDHLYRMDYQKFIQAHRETDADITVAALPMDEQRATAFGLMKIDDEGRIVEFAEKPKGEKLRSMMVDTTILGLDPERAKELPYIASMGIYVFSKDVMLRLLRENFPAANDFGSEVIPGATEIGLRVQAYLYDGYWEDIGTIEAFYNANLGITKKPVPDFSFYDRSAPIYTQPRYLPPSKVLDADVTDSVIGEGCVIKHCTINHSVVGLRSCISEGAVIEDSLLMGADYYETEDDKKVLSENGGIPIGIGKNAHIRKAIIDKNARIGENVKIINFDNVQEAVRETEGYFIKSGIVTVIKDALIPSGTII

SEQ ID NO: 256 - DNA, 1554 bp, Zea mays
atggcgatggcagccatagcctccccgtcgtcgaggaccctgatccctccgcgacaccacggcgccgcgccctccccgtccacctccggcgactcctcgctccgcctcctctgcgcacacccgcgccacggacggcgcggccgggcgatgtccgtctcgacgcccgcggcgcggagccggccgttcgtcttctccccgcgcgcggtgtccgactctaagagctcccagacctgcctcgaccccgacgccagcacgagtgttcttggaatcattctcggaggtggtgctgggactagattgtaccccttgacaaagaagcgtgccaagcctgcagtgccattgggtgccaactatagactgattgatatccccgtcagcaattgtctcaacagcaacatatccaagatctatgtgctaacacaattcaactctgcttccctcaaccgtcacctctcaagagcctacgggaacaacattggagggtacaagaatgacgggttcgttgaagtcttagctgcacagcagagcccagataatccaaactggtttcagggtactgcagatgctgtaaggcaatacttgtggttatttgaggaacataatgtgatggagtttctaattcttgctggcgatcacctgtaccggatggattatgaaaagttcattcaggcacacagagaaacggatgctgatattactgttgctgccctaccaatggatgagaaacgtgcaaccgcatttggcctcatgaaaattgacgaagaagggaggattattgagtttgctgagaaaccgaaaggagatcagttgaaagcaatgatggttgacaccaccatacttggccttgatgacgagagggcaaaggaaatgccttatattgctagcatgggtatatatgtttttagcaaggatgtaatgcttcagctcctccgtgaacaatttcctggagccaatgattttggaagtgaggttattccaggtgcaacaagcattggaaagagggttcaggcttatctatatgatggttattgggaagatattggtacaattgaggcattttataatgcaaacttgggaataaccaagaagccaataccagatttcagcttctatgaccgttctgctccaatctatacacaacctcgacatctgccaccttcaaaggttcttgatgctgatgtgacagacagtgttattggtgagggatgtgttattaaaaactgcaagatacaccattctgtagttggactccgttcttgcatatctgaaggtgctatcatagaggacactttactaatgggtgcggactactatgagactgaagctgacaagaaactccttgccgaaaatggtggcattcccattggtattgggaagaattcacacatcagaaaagcaatcattgacaagaatgctcgaattggagataatgtgaagatactcaacgctgacaatgttcaagaagctgcaagggagacagacgggtacttcatcaaaggtggaattgtcacagtgatcaaggatgctttactccctagtgggacagttatatga

SEQ ID NO: 257 - protein, 517 aa, Zea mays
MAMAAIASPSSRTLIPPRHHGAAPSPSTSGDSSLRLLCAHPRHGRRGRAMSVSTPAARSRPFVFSPRAVSDSKSSQTCLDPDASTSVLGIILGGGAGTRLYPLTKKRAKPAVPLGANYRLIDIPVSNCLNSNISKIYVLTQFNSASLNRHLSRAYGNNIGGYKNDGFVEVLAAQQSPDNPNWFQGTADAVRQYLWLFEEHNVMEFLILAGDHLYRMDYEKFIQAHRETDADITVAALPMDEKRATAFGLMKIDEEGRIIEFAEKPKGDQLKAMMVDTTILGLDDERAKEMPYIASMGIYVFSKDVMLQLLREQFPGANDFGSEVIPGATSIGKRVQAYLYDGYWEDIGTIEAFYNANLGITKKPIPDFSFYDRSAPIYTQPRHLPPSKVLDADVTDSVIGEGCVIKNCKIHHSVVGLRSCISEGAIIEDTLLMGADYYETEADKKLLAENGGIPIGIGKNSHIRKAIIDKNARIGDNVKILNADNVQEAARETDGYFIKGGIVTVIKDALLPSGTVI

SEQ ID NO: 258 - DNA, 2049 bp, Sorghum bicolor
atgtcgctcctgcggcggcggaagcagccgcagccgccgccgccgccctcggacggcgacgggtccgaccacgacgacagcgacaaggggaagaagccgtcctcgtcctcgtcctccgcgccgccgtccaaggaggccacgaggcggaccaaggccaagtggtcgtgcgtggacagctgctgctggctggtcgggtgcgtgtgctccgcctggtggctgctgctctttctctacaacgcgatgccggcctcgttcccgcagtatgtcacggaggccatcacggggccgctcccggaccctcccggggtcaagctgcagaaggaggggctccgtgttaagcaccccgtcgtcttcgtccccggcatcgtcaccggagggctcgagctatgggagggccaccagtgcgccgaggggctcttccgcaagcggctatggggcggcacatttggtgacgtatacaagagacctctatgctgggttgaacatatgtctttggacaacgaaacaggattagacaaacctggaataagggttaggccagtcacaggccttgttgcagcagactatttcgttcctggatattttgtttgggctgtcttaattgccaatttagctcgtattggatatgaagaaaagaccatgtacatggctgcatatgattggaggttatctttccagaacactgaggttcgtgatcaaactttgagcagaataaagagcaacattgaactcatggtagcaacaaatggtggaaatagggtggtagtgatcccgcactccatgggggtcctctattttctgcattttatgaaatgggttgaagcacctcctcccatgggaggcggcggcggtccaaactggtgtgagaagcatattaaagctgtaatgaatattggtggacctttcttaggagttcccaaggcagttgctgggcttttctcatctgaagccaaagatgttgccgttgctagagctattgctcctgatgttctggactccgattttcttgggctccaaactttgcgccatttgatgcgtatgacccgaacatgggattcgacaatgtcaatgattcctaaaggtggtgatacaatttggggaaatctggattggtctccagaagatggccttgaatgtaaagctaagaagcacaaaaccaatgataccgaggtttctaaggatagcaatggggaaaatgtcgaagttcaacctgagcctattaactatggaaggctggtatcctttggtaaagatgtagcggaagcaccttcttcagagattgagcagatagaatttcgtgatgctgttaaaggtaatagtattgcccattcaaatacttcatgccgggagatctggacagaatatcatgaattaggatggggtggaataaaggcagttgaggactacaaagtttacactgctagttctgttatagacctccttcacttcgttgctccaaggatgatgcagcgtggaaatgtccacttctcatatggaattgctgataacttggatgatccgaaataccaacattacaaatattggtcaaaccccttggaaacaaagctaccgaatgctcctgacatggaaatattttcgatgtacggagtaggcattcctaccgaaagggcatatgtctataaggttgccccgcaggcagagtgtaatatacctttccggattgactcctcggctgaaggtggggaggaaaatagctgcttgaaagggggtgtttacttagctgatggtgatgaaactgttccagttcttagtgcgggctacatgtgtgcaaaaggatggcgtggcaaaactcgtttcaaccctgccggcagcaagacttacgtgagagaatacagccattcaccaccctcgactctcctggaaggcaggggcactcagagcggtgcacatgttgatataatggggaactttgctctgattgaggacatcatcagaatagctgctggggcaaccggtgaggaaattggtggcgaccaggtttattcagatatattcaaatggtcagagaagatcaaattgaaattgtaa

SEQ ID NO: 259 - protein, 682 aa, Sorghum bicolor
MSLLRRRKQPQPPPPPSDGDGSDHDDSDKGKKPSSSSSSAPPSKEATRRTKAKWSCVDSCCWLVGCVCSAWWLLLFLYNAMPASFPQYVTEAITGPLPDPPGVKLQKEGLRVKHPVVFVPGIVTGGLELWEGHQCAEGLFRKRLWGGTFGDVYKRPLCWVEHMSLDNETGLDKPGIRVRPVTGLVAADYFVPGYFVWAVLIANLARIGYEEKTMYMAAYDWRLSFQNTEVRDQTLSRIKSNIELMVATNGGNRVVVIPHSMGVLYFLHFMKWVEAPPPMGGGGGPNWCEKHIKAVMNIGGPFLGVPKAVAGLFSSEAKDVAVARAIAPDVLDSDFLGLQTLRHLMRMTRTWDSTMSMIPKGGDTIWGNLDWSPEDGLECKAKKHKTNDTEVSKDSNGENVEVQPEPINYGRLVSFGKDVAEAPSSEIEQIEFRDAVKGNSIAHSNTSCREIWTEYHELGWGGIKAVEDYKVYTASSVIDLLHFVAPRMMQRGNVHFSYGIADNLDDPKYQHYKYWSNPLETKLPNAPDMEIFSMYGVGIPTERAYVYKVAPQAECNIPFRIDSSAEGGEENSCLKGGVYLADGDETVPVLSAGYMCAKGWRGKTRFNPAGSKTYVREYSHSPPSTLLEGRGTQSGAHVDIMGNFALIEDIIRIAAGATGEEIGGDQVYSDIFKWSEKIKLKL

SEQ ID NO: 260 - DNA, 2037 bp, Zea mays
atgtcgctcctgcggcggcggaagcagcagcagctaccgccctcggagggcgacgggtccgaccacgacgacaacgacaaggggaagaagccgtcctcgtcctccgcgccgccgtccaaggagcccacgaggcggaccaaggccaagtggtcgtgcgtggacagctgctgctggctggtcgggtgcgtgtgctccgcctggtggttgctgctctttctctacaacgcgatgccagcttcgttcccgcagtatgtcaccgaggccatcacggggccgctcccggacccgcccggggtcaagctgcagaaggaggggctgcgagctaagcaccccgtcgtctttgtccccggcatcgtcaccgggggcctcgagctatgggagggacaccaatgcgctgagggtctcttccgcaagcggctatggggcggcacatttggtgacgtatacaagagacctctatgctgggttgaacatatgtcgttggacaatgaaactggattagacaaacctggaataagggtcaggtcagtcacaggccttgttgcagcagactatttcgtccctggatattttgtttgggctgtcttaattgccaatttagctcgtattggatatgaagaaaagaccatgtacatggctgcatatgattggaggttatctttccagaacactgaggttcgtgatcaaactttgagcagaataaagagcaatattgaactcatggtagcaacaaatggtggaaatagggtggtggtgatcccacactccatgggggtcctctattttctgcattttatgaaatgggtcgaagcacctcctcccatggggggcggtggtggtccgaactggtgtgagaagcatattaaagctgtaatgaatattggaggacctttcttaggagttcccaaggctgttgctgggcttttctcatctgaagccaaagatgttgccgttgctagagctatcgctcctgatgtcctggactctgattttcttggacttcaaactttgcgccatttgatgcgtatgacccgaacatgggattcaacaatgtcaatgcttcctaaaggtggtgatacaatttggggaaatctggattggtctccagaagatggccttgaatgtaaagctaagaagcataaaaccaatgataccgaggtttctaaggatagcaatggggaaaatatcgaagttcaacctgaacctataaactacggaaggctggtatccttcggtaaagatgtagcagaggcaccttcttcagagattgaacagatagaatttcgtgatgctgttaaaggtaacgatatcgtccattcaaatgcatcatgccgggagatctggacagagtaccatgaattaggatggggtggaataaaggcagtcgcagactacaaagtttacactgccagttctgttatagaccttcttcactttgttgctccaaggatgatgcagcgtggaaatgtccacttttcatatggaattgctgataacttggatgatccgaaatatcaacattacaaatattggtcaaaccccttggaaacaaagctaccgaatgctcctgacatggaaataatttccatgtacggagtaggcattcctactgaaagggcatatgtctacaagttggctccacaggcagagtgctatataccattccggattgacgcctcggctgatggcggggaggaaaacaaatgcttgaaagggggtgtttacttagctgacggcgacgaaactgttccagttcttagcgcgggctacatgtgtgcaaaagggtggcgtggcaaaactcgtttcaaccctgccggcagcaagacttacgtgagagagtacagccattcaccaccctcaactctcctggaaggcaggggcactcagagcggtgcacatgttgatataatggggaacttcgctttgatcgaggacatcatcaggatagctgccggggcaaccggtgaggaaattggtggcgaccaggtttattcagatatattcaaatggtcagagaaaatcaaattgaaattgtaa

SEQ ID NO: 261 - protein, 678 aa, Zea mays
MSLLRRRKQQQLPPSEGDGSDHDDNDKGKKPSSSSAPPSKEPTRRTKAKWSCVDSCCWLVGCVCSAWWLLLFLYNAMPASFPQYVTEAITGPLPDPPGVKLQKEGLRAKHPVVFVPGIVTGGLELWEGHQCAEGLFRKRLWGGTFGDVYKRPLCWVEHMSLDNETGLDKPGIRVRSVTGLVAADYFVPGYFVWAVLIANLARIGYEEKTMYMAAYDWRLSFQNTEVRDQTLSRIKSNIELMVATNGGNRVVVIPHSMGVLYFLHFMKWVEAPPPMGGGGGPNWCEKHIKAVMNIGGPFLGVPKAVAGLFSSEAKDVAVARAIAPDVLDSDFLGLQTLRHLMRMTRTWDSTMSMLPKGGDTIWGNLDWSPEDGLECKAKKHKTNDTEVSKDSNGENIEVQPEPINYGRLVSFGKDVAEAPSSEIEQIEFRDAVKGNDIVHSNASCREIWTEYHELGWGGIKAVADYKVYTASSVIDLLHFVAPRMMQRGNVHFSYGIADNLDDPKYQHYKYWSNPLETKLPNAPDMEIISMYGVGIPTERAYVYKLAPQAECYIPFRIDASADGGEENKCLKGGVYLADGDETVPVLSAGYMCAKGWRGKTRFNPAGSKTYVREYSHSPPSTLLEGRGTQSGAHVDIMGNFALIEDIIRIAAGATGEEIGGDQVYSDIFKWSEKIKLKL

SEQ ID NO: 262 - DNA, 846 bp, Sorghum bicolor
atgccgccgcccagcctcaccgcggccgccgccaccaccacaacgcgccgccgcaaggaccacccggcgccgggcggaggcgcgggggcgaaggagatgggcgcggcggcggcgtccgcggcggaggggtgggcgcggcggccggagtggtgctcggcggcgggcgtggcgggcgtgctgcggcggcacccggcgcccgcgctcttcgggtgcggcctcctgctcttcatggccgtcgagtacaccatccccatggtcaggccggactccccgccgctcgacctgggattcatcgccaccaggaacatgcacgccgccgtcgccgccacgccctggctcaactcgctcctcgccgcgctcaacacggtcatcgtcgcgatgcaggcggcgtacatcctgtgggcgatcctggcggagcagcggccgcgggcggccgtcgcggcgctgatgatgttcacctgccggggcgtgctgggctgcgccacgcagctgccgctgcccgaggagttcctggggtccgggatggacttccccgtgggcaacgtctccttcttcctcttcttctcgggccacgtcgcgggcgcggtgatcgcggccgccgacatgcgccgcgagggacgggcggcgctcgcgcgcctctacgacgcgctcaacgtgctccaggcggtcaggctgctcgcgtgcaggggacactacaccatcgacctggctgtcggcgtcggggccggggtcctcttcgacacgctctccgggtggtacttcgacgccaagaacggcgacggcaagaacgcgcccgagaagcactgccgtagctgccagtgccacaaggctctcctctcacactag

SEQ ID NO: 263 - protein, 281 aa, Sorghum bicolor
MPPPSLTAAAATTTTRRRKDHPAPGGGAGAKEMGAAAASAAEGWARRPEWCSAAGVAGVLRRHPAPALFGCGLLLFMAVEYTIPMVRPDSPPLDLGFIATRNMHAAVAATPWLNSLLAALNTVIVAMQAAYILWAILAEQRPRAAVAALMMFTCRGVLGCATQLPLPEEFLGSGMDFPVGNVSFFLFFSGHVAGAVIAAADMRREGRAALARLYDALNVLQAVRLLACRGHYTIDLAVGVGAGVLFDTLSGWYFDAKNGDGKNAPEKHCRSCQCHKALLSH

SEQ ID NO: 264 - DNA, 849 bp, Zea mays
atgccgccgcccagcctcaccgccgccggcaccaccaccaccacaacccgccgccgcaacgaccgagccgcgaaggtccaccaggtactgggcgaaggcgcggggacggaggagatgggcgcggtggcggacgggtggacgcggcccgagtggtgctcggcggcgggcgtcgcgggcgtgctgcggcggcacccggcgcccgcgctcttcgggtgcggcctcctgctcttcatggccgtcgagtacaccatccccatggtcaagccggacgcgccgccgctcgacctaggcttcctcgccaccgcgggcatgcacgccgccatcgccgcgaggccctggcttaactcgctcctcgccgcgctcaacacggtcttcgtcgcgatgcaggcggcgtacatcctgtgggccatcctcgccgagcagcggccgcgcgcggccgtcgccgcgctcatgatgttcacttgccggggcgtgctgggctgcgccacccagctcccgctgccggaggagttcctgggctccgggatggacttccccgtgggcaacgtctccttcttcctcttcttctcgggccacgtcgcgggcgcggtgatcgcggcggccgacatgcggcgcgaggggcggctggcgctggcgcgcctcttcgactcgctcaacgtgctccaggtggtcaggctgctcgcgtgcaggggacactacaccattgacctggctgttggcgttggsgcgggcatcctcttcgacacgctctccggatggtacttcgacgccaagaacggcgatagcagcaacgcaccggagaagcagtgccggagctgccagtgccacaaggccctcctttcacactag

SEQ ID NO: 265 - protein, 282 aa, Zea mays
MPPPSLTAAGTTTTTTRRRNDRAAKVHQVLGEGAGTEEMGAVADGWTRPEWCSAAGVAGVLRRHPAPALFGCGLLLFMAVEYTIPMVKPDAPPLDLGFLATAGMHAAIAARPWLNSLLAALNTVFVAMQAAYILWAILAEQRPRAAVAALMMFTCRGVLGCATQLPLPEEFLGSGMDFPVGNVSFFLFFSGHVAGAVIAAADMRREGRLALARLFDSLNVLQVVRLLACRGHYTIDLAVGVGAGILFDTLSGWYFDAKNGDSSNAPEKQCRSCQCHKALLSH

SEQ ID NO: 266 - DNA, 2223 bp, Sorghum bicolor
atggggggcgccgtgttggtcgccatcgcggcctctatcggcaacttgctgcagggctgggacaatgcgacaattgctggagcggtcttgtacataaagaaggaattcaacttgcagagcgagcccctaattgagggcctcatcgtggccatgtccctcattggggcaacagtcatcacgacgttctctggggcagtggccgactctgttggtaggaggcccatgctgatcgcctcggctatcctctactttgttagtgggctggtgatgctctgggcgccaaatgtgtatgtcttgctccttgcaaggcttatcgatgggtttggtattgggttggccgtcacacttgttcctttgtacatttctgagactgcgccgacggatattcgagggctgttgaacacactaccgcagttcagtggttcaggagggatgttcctttcctactgtatggtgtttggaatgtccctcatgcccacacctgattggaggctcatgcttggagttctgtcgatcccatcacttatttactttggattgactatcttctacttgcctgaatcaccaaggtggctcgtgagtaaaggaaggatggctgaggcaaagcgagtgttgcaaaggctgcggggaagggaagatgtctcaggggaaatggctcttctagttgaaggtttgggggttgggaaagatacacgtattgaagaatacataattggccctgatgacgagcttgctgatgaagggctggctcccgatccagagaagatcaaattatatggacctgaagaaggtctatcttgggttgcccgacctgttcggggacaaagtgctcttggaagcgcattaggtctcatctctcgtcatgggagtatggctagtcagggtaagcccctcgtggatcctgtggtcactcttttcggaagtgttcatgaaaagatgcctgagataatggggagcatgaggagcacattgtttcccaactttggcagcatgtttagtgttgccgaacagcagcaggtgaaggctgactgggatgccgagagtcaaagggagggtgacgattatgcttcagatcatggtggcgatgacattgaggataacctccaaagcccacttatttctcgtcaagcaacaagtgtggaaggaaaggagattgctgcacctcatggtagcataatgggtgctgtgggaagaagcagtagcctgcagggaggggaggcagtaagcagcatgggcattggtggaggatggcagttggcgtggaaatggactgagagagagggcgaagatggggaaaaggaaggtggcttccagcgtatttatttgcatgaggagggcgtacaaggcaggggttctatattgtcattaccaggaggggatgttcctcctggtggtgagttcgtccaggctgcagctcttgtgagtcaaccagctctttactcaaaggaactgctggagcaacgtgctgctggtcctgcgatgatgcatccatctgaggcagttgctaaaggtccaagatgggctgacctgtttgagcctggagtgaagcatgcactgtttgttggcataggaatacagatcctgcaacagtttgctggcatcaatggtgttctctactacactcctcaaattcttgagcaagcaggtgttggtgttcttctgtcgaacattggccttagcgcatcttctgcatcaattcttattagtgccttgacaaccttattgatgcttccaagcattggtattgcaatgaggctcatggatatgtctggaaggaggtttcttctccttgcgacaatccctatcttgatagttgccctagctatcttggtcgtggtcaatattgtggatgtgggaaccatggtgcatgctgcactctccacgattagtgtcatagtctatttctgcttctttgtcatggggtttgggcctattcccaacattctctgtgcagagatctttcccaccaccgtccgcggcatctgcatagccatctgcgccttaaccttctggattggtgacattatcgtgacatacacacttcctgtgatgctgaatgccatcgggctcgctggtgtctttgggatatacgccgtcgtttgcatcctggctcttgtatttgtattcatcaaggtgccagagacaaagggcatgcctctcgaggtcatcactgagttcttctccgttggagcaaagcaagccaaggaagccagggaagattaa

SEQ ID NO: 267 - protein, 740 aa, Sorghum bicolor
MGGAVLVAIAASIGNLLQGWDNATIAGAVLYIKKEFNLQSEPLIEGLIVAMSLIGATVITTFSGAVADSVGRRPMLIASAILYFVSGLVMLWAPNVYVLLLARLIDGFGIGLAVTLVPLYISETAPTDIRGLLNTLPQFSGSGGMFLSYCMVFGMSLMPTPDWRLMLGVLSIPSLIYFGLTIFYLPESPRWLVSKGRMAEAKRVLQRLRGREDVSGEMALLVEGLGVGKDTRIEEYIIGPDDELADEGLAPDPEKIKLYGPEEGLSWVARPVRGQSALGSALGLISRHGSMASQGKPLVDPVVTLFGSVHEKMPEIMGSMRSTLFPNFGSMFSVAEQQQVKADWDAESQREGDDYASDHGGDDIEDNLQSPLISRQATSVEGKEIAAPHGSIMGAVGRSSSLQGGEAVSSMGIGGGWQLAWKWTEREGEDGEKEGGFQRIYLHEEGVQGRGSILSLPGGDVPPGGEFVQAAALVSQPALYSKELLEQRAAGPAMMHPSEAVAKGPRWADLFEPGVKHALFVGIGIQILQQFAGINGVLYYTPQILEQAGVGVLLSNIGLSASSASILISALTTLLMLPSIGIAMRLMDMSGRRFLLLATIPILIVALAILVVVNIVDVGTMVHAALSTISVIVYFCFFVMGFGPIPNILCAEIFPTTVRGICIAICALTFWIGDIIVTYTLPVMLNAIGLAGVFGIYAVVCILALVFVFIKVPETKGMPLEVITEFFSVGAKQAKEARED

SEQ ID NO: 268 - DNA, 2244 bp, Zea mays
atggggggcgccgtgatggtcgccatcgcggcctctatcggcaacttgctgcagggctgggacaatgcgacaattgctggagccgtcctgtacataaagaaggaattcaacctgcagagcgagcctctgatcgagggcctcatcgtcgccatgtccctcattggggcaacagtcatcacgacgttctccggggcagcggccgactgcgttggtaggaggcccatgctggtcgcctcggctgtcctctacttcgtcagtgggctggtgatgctttgggcgccaagtgtgtacatcttgctcctcgcaaggctcattgatgggttcggtatcggtttggcggtcacacttgttcctctctacatctccgagactgcaccgacagacattcgtgggctgttgaacacgttgccgcagttcagtgggtcaggagggatgttcctctcctactgcatggtgtttgggatgtccctcatgcccaaacctgattggaggctcatgcttggagttctgtcgatcccgtcacttatttactttggactgactgtcttctacttgcctgaatcaccaaggtggcttgtgagcaaaggaaggatggcggaggcgaagagagtgttgcaaaggctgcggggaagagaagatgtctcaggggagatggctcttctagttgaaggtttgggggtcggtaaagatacacgtattgaagaatacataattggtcccgatgatgaacttgctgatgaagggctggctccagatccagagaagatcaaactatatggacctgaagaaggcctatcttgggttgcccgacctgttcggggacaaagtgctcttggaagcgcgttaggtctcatctctcgtcatgggagtatggcggctagtcagggtaagcccctcgtggatcctatggtcactcttttcggaagtgttcatgaaaagatgcctgagatcatggggagcatgaggagcacattgtttcccaactttggcagcatgtttagtgttgccgaccagcagcaggtgaaagctgactgggacgccgagagtcaaagggaaggtgaagattatgcttcggatcatggtggcgatgacatcgaggataacctccaaagcccacttatttctcgtcaggcaacaagtgtggaaggaaaggagatcgctgcacctcatggtagcatattgggtgctgtgggaaggagcagtagcttgcagggaggggaggcagtaagcagcatgggcattggcggaggatggcagttggcgtggaaatggaccgagagagagggcgaagatgggcaaaaggaaggtggcttccagcgtatttacttgcatgaggagggcgtacaaggcaacaggggttctatattgtcattaccaggcggggatgttcctcctggtggtgagttcatccaggctgcagctcttgtgagccaaccagctctttactctaaggaactgctggagcaacgtgctgctggtcctgcgatgatgcatccatctgaagcagttactaaaggtccaagatgggccgacctatttgagcctggggtgaagcatgcactgtttgttggcataggaatacagatcctgcaacagtttgctggcatcaacggcgttctctactacactcctcaaattcttgagcaagcaggcgttggtgttcttctgtcgaacctcggccttaacgcttcttcggcatcaatcctcattagcgccctgacgaccttactgatgctcccaagcatcggcattgcgatgaggctcatggatatgtccggaaggaggtttctcctcctcgcgacgatcccagtcctaatagtcgcgctactcgtcctggtggtgtccaacatcgtggacgtgggggacgtggcgcacgcggcgctctccacggccagcgtcatagtctacttctgcttcttcgtcatggggttcgggcccgtccccaacatcctctgcgcagagatcttccccaccacggtccgcggtgtctgcatcgccatctgcgccctggccttctggctcggtgacatcatcgtgacgtacactctccccgtgatgctgaacgtcgtcgggctcgccggcgtctttggggtgtacgccgtcgtgtgcgtcctagccctcgcgttcgtgttcgtcaaggtgcccgagacgaagggcatgcctctcgaggtcatcaccgagttcttctccgttggggcaaagcaagccaaggaagaggaggaggaggaggccagggaaggttga

SEQ ID NO: 269 - protein, 747 aa, Zea mays
MGGAVMVAIAASIGNLLQGWDNATIAGAVLYIKKEFNLQSEPLIEGLIVAMSLIGATVITTFSGAAADCVGRRPMLVASAVLYFVSGLVMLWAPSVYILLLARLIDGFGIGLAVTLVPLYISETAPTDIRGLLNTLPQFSGSGGMFLSYCMVFGMSLMPKPDWRLMLGVLSIPSLIYFGLTVFYLPESPRWLVSKGRMAEAKRVLQRLRGREDVSGEMALLVEGLGVGKDTRIEEYIIGPDDELADEGLAPDPEKIKLYGPEEGLSWVARPVRGQSALGSALGLISRHGSMAASQGKPLVDPMVTLFGSVHEKMPEIMGSMRSTLFPNFGSMFSVADQQQVKADWDAESQREGEDYASDHGGDDIEDNLQSPLISRQATSVEGKEIAAPHGSILGAVGRSSSLQGGEAVSSMGIGGGWQLAWKWTEREGEDGQKEGGFQRIYLHEEGVQGNRGSILSLPGGDVPPGGEFIQAAALVSQPALYSKELLEQRAAGPAMMHPSEAVTKGPRWADLFEPGVKHALFVGIGIQILQQFAGINGVLYYTPQILEQAGVGVLLSNLGLNASSASILISALTTLLMLPSIGIAMRLMDMSGRRFLLLATIPVLIVALLVLVVSNIVDVGDVAHAALSTASVIVYFCFFVMGFGPVPNILCAEIFPTTVRGVCIAICALAFWLGDIIVTYTLPVMLNVVGLAGVFGVYAVVCVLALAFVFVKVPETKGMPLEVITEFFSVGAKQAKEEEEEEAREG

SEQ ID NO: 270 - DNA, 2238 bp, Sorghum bicolor
atgtcgggggctgttcttgtcgccatcgccgcctccatcggcaatctgttgcaggggtgggacaatgccaccatcgcaggtgctgttctgtacataaagaaggaattccaattacaaaatgagcccactgtggaggggctgattgtggccatgtcacttattggtgccaccatcatcactacattctctgggccagtatcagactggatcggccgccgccctatgctcatcctctcgtcaattctgtactttctcagcagcctcatcatgctatggtcccctaatgtctatgtcctgctgctggcacgcctcgtagacggattcggtattggcttggctgtcacgcttgtgcctttgtacatttcagaaacagcccctccagagattagaggtttgctgaatacactgccacagttcagtggatcaggagggatgttcttgtcatactgcatggtgtttgggatgtcactgttgccatcacctgattggagaattatgcttggggtgctcgcgataccttcattgttcttctttggattgacaatattttaccttcctgaatccccaagatggcttgttagcaaaggtcggatggcagaggcaaagaaggtgttgcaaaaattacgcagcaaagaagatgtctcaggtgaattgtcccttcttgttgaagggttggaggttggaggagacacttcgattgaagagtacatcattggccctgccactgacgcagccgatgatcatgttactgatggtgataaggaacaaatcacactttatgggcctgaagaaggccagtcatggattgctcgaccttccaagggacccagcatgcttggaagtgtactttctctcgcatctcgtcatggcagcttggtgaaccagagtgtaccccttatggatccgattgtgacactttttgggagtgtccatgagaatatgcctcaagctggaggaagtatgaggagcacattgtttccaaactttggaagtatgttcagtgtcacagatcagcatgccaaaaatgagcagtgggacgaagagaatcttcacagggacgatgaggagtatgcatctgatggtgcaggaggtgattatgaggacaatctccacagtccattgctgtccaggcagacaacaagtgcggaagggaaggacattgtgcaccatggtcaccgtggaagttctttgagcatgagaaggcaaagcctcttgggggaggctggagagggtgtgagcagcactgatattggtgggggatggcagcttgcatggaaatggtcagagaaggaaggtgaggatggtaagaaggaaggtggtttcaaaagagtctacttgcaccaagagggagttcctggctcaagaatgggctcaattgtttcacttcctggtggtggcgatgttcatgagggtggcgagtttgtacatgctgctgctttagtaagccagtcagcacttttctcgaaggatcttaccgaaccacgcatgtctggtgctgccatgattaacgcatccgaggtagccgccaaaggttcaagctggaaagatttgtttgaacctggtgtgaggcgtgccctgttagtcggtgttggaattcagatccttcaacagtttgctggaatcaatggtgttctgtactataccccacaaattctcgagcaagctggcgtggcagttcttctttccaatcttggtctcagctcagcatcagcatctatcttgatcagttctctcactaccttactgatgcttcctagcattggcttagccatgagacttatggatctttctggaagaaggtttttgctgctaggcacaattccaatcttgatagcatctttagttatcctggtcgtgtccaatgtgattgacctgggtacagtggcccatgctgcgctctccacagtcagtgtcatcatctacttctgctgctttgtcatgggatttggtcccatccccaacattctatgtgcagagatctttccaaccagggttcgcggtctctgcattgccatctgtgccttgacgttttggattggagacatcattgtcacctacagccttcctgtaatgctgaatgctattggactagcaggtgtttttggcatatatgcagtcgtatgcttgattgcctttgtgtttgtcttccttaaggttcctgagacaaagggaatgccccttgaagtcatcactgagttctttgcagttggtgcgaagcaagcggctgcaaaagcctaa

SEQ ID NO: 271 - protein, 745 aa, Sorghum bicolor
MSGAVLVAIAASIGNLLQGWDNATIAGAVLYIKKEFQLQNEPTVEGLIVAMSLIGATIITTFSGPVSDWIGRRPMLILSSILYFLSSLIMLWSPNVYVLLLARLVDGFGIGLAVTLVPLYISETAPPEIRGLLNTLPQFSGSGGMFLSYCMVFGMSLLPSPDWRIMLGVLAIPSLFFFGLTIFYLPESPRWLVSKGRMAEAKKVLQKLRSKEDVSGELSLLVEGLEVGGDTSIEEYIIGPATDAADDHVTDGDKEQITLYGPEEGQSWIARPSKGPSMLGSVLSLASRHGSLVNQSVPLMDPIVTLFGSVHENMPQAGGSMRSTLFPNFGSMFSVTDQHAKNEQWDEENLHRDDEEYASDGAGGDYEDNLHSPLLSRQTTSAEGKDIVHHGHRGSSLSMRRQSLLGEAGEGVSSTDIGGGWQLAWKWSEKEGEDGKKEGGFKRVYLHQEGVPGSRMGSIVSLPGGGDVHEGGEFVHAAALVSQSALFSKDLTEPRMSGAAMINASEVAAKGSSWKDLFEPGVRRALLVGVGIQILQQFAGINGVLYYTPQILEQAGVAVLLSNLGLSSASASILISSLTTLLMLPSIGLAMRLMDLSGRRFLLLGTIPILIASLVILVVSNVIDLGTVAHAALSTVSVIIYFCCFVMGFGPIPNILCAEIFPTRVRGLCIAICALTFWIGDIIVTYSLPVMLNAIGLAGVFGIYAVVCLIAFVFVFLKVPETKGMPLEVITEFFAVGAKQAAAKA

SEQ ID NO: 272 - DNA, 2238 bp, Zea mays
atgtcgggggctgttcttgtcgccatagtcgcctccatcggcaatctattgcaggggtgggacaatgccaccatcgcagctgctgttctgtatataaagaaggaatttcaattgcaaaatgagcccactgtggagggactaattgtgtcaatgtcacttatcggcgccaccatcgttactacattctccgggccattatcagactcgattggccgacgccctatgcttattctctcttcaattctgtacttcttcagcggcctcatcatgctatggtctcctaatgtctatgtcctgctgttggcacgcttcgtagatggatttggtattggcttggctgtcacgcttgtgcctttgtacatttcagaaatagccccttcggagattagaggtttgctgaatacactaccacaattcagtggatcaggaggaatgttcttgtcatactgcatggtgtttgggatgtccctgtcgccatcacccgattggagaattatgcttggtgtgctcgcgataccttcattgttcttctttggtttgacaatattttatcttcctgaatctccaagatggctcgttagcaaaggtcggatggcagaggcaaaaaaggtgttgcaaaagttacgggggaaagacgatgtctcaggtgaattgtcccttcttctcgaagggttggaggttggaggagacacttccattgaagagtacatcattggacctgccaccgaggcagccgatgatcttgttactgacggtgataaggaacaaatcacactttatgggcctgaagaaggccagtcatggattgctcgaccttccaagggacccagcatgcttggaagtgtgctttctcttgcatctcgtcatgggagcatggtgaaccagagtgtaccccttatggatccgattgtgacactttttggtagtgtccatgagaatatgcctcaagctggaggaagtatgaggagcacattgtttccaaactttggaagtatgttcagtgtcacagatcagcatgccaaaaatgagcagtgggatgaagagaatcttcatagggatgacgaggagtacgcatctgatggtgcaggaggtgactatgaggacaatctccatagcccattgctgtccaggcaggcaacaggtgcggaagggaaggacattgtgcaccatggtcaccgtggaagtgctttgagcatgagaaggcaaagcctcttaggggagggtggagatggtgtgagcagcactgatatcggtgggggatggcagcttgcttggaaatggtcagagaaggaaggtgagaatggtagaaaggaaggtggtttcaaaagagtctacttgcaccaagagggagttcctggctcaagaaggggctcaattgtttcacttcccggtggtggcgatgttcttgagggtagtgagtttgtacatgctgctgctttagtaagtcagtcagcacttttctcaaagggtcttgctgaaccacgcatgtcagatgctgccatggttcacccatctgaggtagctgccaaaggttcacgttggaaagatttgtttgaacctggagtgaggcgtgccctgttagtcggtgttggaattcagatccttcaacagtttgctggaataaacggtgttctgtactataccccacaaattcttgagcaagctggtgtggcagttattctttccaaatttggtctcagctcggcatcagcatccatcttgatcagttctctcactaccttactaatgcttccttgcattggctttgccatgctgcttatggatctttccggaagaaggtttttgctgctaggcacaattccaatcttgatagcatctctagttatcctggttgtgtccaatctaattgatttgggtacactagcccatgctttgctctccaccgtcagtgttatcgtctacttctgctgcttcgttatgggatttggtcccatccccaacattttatgtgcagagatctttccaaccagggttcgtggcctctgtattgccatttgtgcctttacattctggatcggagatatcatcgtcacctacagccttcctgtgatgctgaatgctattggactggcgggtgttttcagcatatatgcagtcgtatgcttgatttcctttgtgttcgtcttccttaaggtccctgagacaaaggggatgccccttgaggttattaccgaattctttgcagttggtgcgaagcaagcggctgcaaaagcctaa

SEQ ID NO: 273 - protein, 745 aa, Zea mays
MSGAVLVAIVASIGNLLQGWDNATIAAAVLYIKKEFQLQNEPTVEGLIVSMSLIGATIVTTFSGPLSDSIGRRPMLILSSILYFFSGLIMLWSPNVYVLLLARFVDGFGIGLAVTLVPLYISEIAPSEIRGLLNTLPQFSGSGGMFLSYCMVFGMSLSPSPDWRIMLGVLAIPSLFFFGLTIFYLPESPRWLVSKGRMAEAKKVLQKLRGKDDVSGELSLLLEGLEVGGDTSIEEYIIGPATEAADDLVTDGDKEQITLYGPEEGQSWIARPSKGPSMLGSVLSLASRHGSMVNQSVPLMDPIVTLFGSVHENMPQAGGSMRSTLFPNFGSMFSVTDQHAKNEQWDEENLHRDDEEYASDGAGGDYEDNLHSPLLSRQATGAEGKDIVHHGHRGSALSMRRQSLLGEGGDGVSSTDIGGGWQLAWKWSEKEGENGRKEGGFKRVYLHQEGVPGSRRGSIVSLPGGGDVLEGSEFVHAAALVSQSALFSKGLAEPRMSDAAMVHPSEVAAKGSRWKDLFEPGVRRALLVGVGIQILQQFAGINGVLYYTPQILEQAGVAVILSKFGLSSASASILISSLTTLLMLPCIGFAMLLMDLSGRRFLLLGTIPILIASLVILVVSNLIDLGTLAHALLSTVSVIVYFCCFVMGFGPIPNILCAEIFPTRVRGLCIAICAFTFWIGDIIVTYSLPVMLNAIGLAGVFSIYAVVCLISFVFVFLKVPETKGMPLEVITEFFAVGAKQAAAKA

SEQ ID NO: 274 - DNA, 1464 bp, Sorghum bicolor
atggtgccggaccagtggtacgacaccaacggcgtctggacaggctccgccaccacgctccccgacggccgcctcgccatgctctacaccggctccaccaacgcctccgtgcaggtgcagtgcctcgccgtccccgccgacgacgccgacccgctgctcaccaactggaccaagtacgagggcaacccggtcctgtacccgccgccggggatcgggcccaaggacttccgtgaccccaccacggcgtggttcgacccgtcggacaacacctggcgcatcgtcatcgggtccaaggacgacgccgagggcgaccacgccggcatcgccgtcgtctaccggaccaaggacttcgtcagcttcgagctcctccccggcctcctccaccgcgtcgcgaggacggggatgtgggagtgcatcgacttctaccccgtcgccacccgcggcaaggcgtccgggaacggcgtcgacatgtccgacgccttcggcaagaacggcgccattgttggggacgtcgtgcacgttatgaaggccagcatggacgacgaccgccatgactactacgcgctcgggaggtacgatgcggccaccaacgagtggacgccgctcgacgccgagaaggacgtcggcatcgggctccggtatgactggggcaagttttacgcgtccaagaccttctatgaccccgccaagcgccgccgcgtgctctggggatgggtcggcgagaccgactcggagcgcgctgacgtctccaagggatgggcatcgttgcagggtatcccccggacggtgctgctggacaccaagacgggcagcaacctgctgcagtggcccgtggaggaagcggagacgctgcgcaccaactccacggacctcagcggcatcaccatcgactacggctcggcgttcccgctcaacctccggcgcgccacgcagctggacatcgaggcggagttccagctcgaccgccgcgccgtcatgtcgctcaacgaggccgacgtggggtacaactgcagcacgagcggtggcgccgcggcccgcggtgccctcggccccttcggcctgctcgtcctcgccgaccagcacctgcgcgagcagacggccgtctacttctacgtggccaagggcctggacggctccctcaccacgcacttttgccaggacgagtcccggtcctccagcgccaacgacatcgtcaagcgcgtcgtcggcagctccgtccccgtgctggacgacgagaccacgctctcgctccgcgtgctcgtcgaccactccatcgtcgagagcttcgcgcagggcggaaggtcgacggcaacctcgcgcgtctaccccaccgaggccatctacgccaacgccggcgtgttcctcttcaacaacgccaccgccgcgcgcgtcaccgccaagaagctcgtcgtccacgagatggactcatcctacaaccacgactacatggtcacggacatctga

SEQ ID NO: 275 - protein, 487 aa, Sorghum bicolor
MVPDQWYDTNGVWTGSATTLPDGRLAMLYTGSTNASVQVQCLAVPADDADPLLTNWTKYEGNPVLYPPPGIGPKDFRDPTTAWFDPSDNTWRIVIGSKDDAEGDHAGIAVVYRTKDFVSFELLPGLLHRVARTGMWECIDFYPVATRGKASGNGVDMSDAFGKNGAIVGDVVHVMKASMDDDRHDYYALGRYDAATNEWTPLDAEKDVGIGLRYDWGKFYASKTFYDPAKRRRVLWGWVGETDSERADVSKGWASLQGIPRTVLLDTKTGSNLLQWPVEEAETLRTNSTDLSGITIDYGSAFPLNLRRATQLDIEAEFQLDRRAVMSLNEADVGYNCSTSGGAAARGALGPFGLLVLADQHLREQTAVYFYVAKGLDGSLTTHFCQDESRSSSANDIVKRVVGSSVPVLDDETTLSLRVLVDHSIVESFAQGGRSTATSRVYPTEAIYANAGVFLFNNATAARVTAKKLVVHEMDSSYNHDYMVTDI

SEQ ID NO: 276 - protein, 638 aa, Sorghum bicolor
METRDTTAPLPYSYTPLPAADAASAEVTGTGHRGGRSRRRSLCAAALVLSAALLLAVAALTGVGRRVDVVPGGAGSPRSTSSISRGPDAGVSEKTSGAWSGGGRLRSPVYYKGWYHLFYQYNPDGAIWGNKIAWGHAVSRDLIHWRHLPLAMVPDQWYDTNGVWTGSATTLPDGRLAMLYTGSTNASVQVQCLAVPADDADPLLTNWTKYEGNPVLYPPPGIGPKDFRDPTTAWFDPSDNTWRIVIGSKDDAEGDHAGIAVVYRTKDFVSFELLPGLLHRVARTGMWECIDFYPVATRGKASGNGVDMSDAFGKNGAIVGDVVHVMKASMDDDRHDYYALGRYDAATNEWTPLDAEKDVGIGLRYDWGKFYASKTFYDPAKRRRVLWGWVGETDSERADVSKGWASLQGIPRTVLLDTKTGSNLLQWPVEEAETLRTNSTDLSGITIDYGSAFPLNLRRATQLDIEAEFQLDRRAVMSLNEADVGYNCSTSGGAAARGALGPFGLLVLADQHLREQTAVYFYVAKGLDGSLTTHFCQDESRSSSANDIVKRVVGSSVPVLDDETTLSLRVLVDHSIVESFAQGGRSTATSRVYPTEAIYANAGVFLFNNATAARVTAKKLVVHEMDSSYNHDYMVTDI

SEQ ID NO: 277 - DNA, 2022 bp, Zea mays
atggagacccgggacacggatgcgacgccgctcccctactcgtacacgccgctgccggccgccgacgccgcgtcggccgaggtctccggcaccggcaggacgcggagcaggcggcggcccctctgcgcggcggcgctcgtgctctccgccgcgctgctcctagccgtggccgcgctcgtcggcgtcggtagccggcccggcgcggtggggatgacagagtcggcggcctcgtcgccgacgccgagcaggagcaggggccccgaggccggcgtgtccgagaagacgtccggcgcgtctgacgacggcggcaggctccgtggagccggcgggaacgccttcccgtggagcaatgcgatgctgcagtggcagcgcacgggattccacttccagccgcagaagaactggatgaacgaccccaatggccccgtgtactacaagggctggtaccacctcttctaccagtacaaccctgacggcgccatctggggcaacaagatcgcgtggggccacgccgtgtcccgcgacctgatccactggcgccacctcccgctggccatggtgcccgaccagtggtacgacaccaacggcgtgtggacggggtccgccaccacgctccccgacggccgcctcgccatgctctacacgggctccaccaacgcctccgtccaggtgcagtgcctggccgtgcccgccgacgacgccgacccgctgctcaccaactggaccaagtacgagggcaacccggtgctgtacccgcccccgggcatcgggcccaaggacttccgcgaccccaccacggcctggatcgacccctcggacggcgcatggcgcgtcgtcatcggctccaaggacgacgacggccacgcgggcatcgccgtcgtctaccgcaccacggacctggtgcacttcgagctcctcccgggcctgctccaccgcgtcgacggcaccggcatgtgggagtgcatcgacttctaccccgtcgccacacgaggcagggcgtcggccaacggcgtcgacatgtccgacgccatcgccagcaacggcgccgtcgccggggacgtcctgcacgtcatgaaggccagcatggacgacgaccgccacgactactacgcgctggggaggtacgacgcggccgccaacgcctggacgccgatcgacgccggcagggacgtcggcatcggcctgcgctacgactggggcaagttctacgcgtccaagacgttctacgacccggccaagcgccgccgcgtgctgtggggatgggttggcgagacagactcggagcgcgcggacgtgtccaagggatgggcgtcgctgcagggtatcccccggacggtgctcctggacaccaagacgggtagcaacctgctgcagtggcccgtggaggaggtggagacgctgcgcaccaactccaccgacctcagcggcatcaccatcgactacggctccgtgttcccgctcaacctccgccgcgccacccagctggacatcgaggcggagttccagctggaccgccgcgccgtcatgtcgctcaacgaggcggacgtgggctacaactgcagcaccagcgggggcgccgccggccgcggcgcgctggggcccttcggcctgctcgtcctcgccgaccgccgcctccgccgcgagcagacggccgtctacttctacgtggccaagggcctggacggctccctcgccacgcacttctgccaggacgagtcccgctcctccagcgccaccgacatcgtcaagcgcgtcgtcggcagcgccgtccccgtgctggaggacgaggccacgctctcgctccgggtgctcgtcgaccactccatcgtcgagagcttcgcgcagggcgggaggtccaccgccacatcgcgcgtctaccccaccgaggccatctacgccaacgccggcgtcttcctcttcaacaacgccaccgccgcgcgggtcacggccacgaagctcgtcgtccacgagatggactcgtcatacaaccacgactacatggcgccggtggcagacatctga

SEQ ID NO: 278 - protein, 673 aa, Zea mays
METRDTDATPLPYSYTPLPAADAASAEVSGTGRTRSRRRPLCAAALVLSAALLLAVAALVGVGSRPGAVGMTESAASSPTPSRSRGPEAGVSEKTSGASDDGGRLRGAGGNAFPWSNAMLQWQRTGFHFQPQKNWMNDPNGPVYYKGWYHLFYQYNPDGAIWGNKIAWGHAVSRDLIHWRHLPLAMVPDQWYDTNGVWTGSATTLPDGRLAMLYTGSTNASVQVQCLAVPADDADPLLTNWTKYEGNPVLYPPPGIGPKDFRDPTTAWIDPSDGAWRVVIGSKDDDGHAGIAVVYRTTDLVHFELLPGLLHRVDGTGMWECIDFYPVATRGRASANGVDMSDAIASNGAVAGDVLHVMKASMDDDRHDYYALGRYDAAANAWTPIDAGRDVGIGLRYDWGKFYASKTFYDPAKRRRVLWGWVGETDSERADVSKGWASLQGIPRTVLLDTKTGSNLLQWPVEEVETLRTNSTDLSGITIDYGSVFPLNLRRATQLDIEAEFQLDRRAVMSLNEADVGYNCSTSGGAAGRGALGPFGLLVLADRRLRREQTAVYFYVAKGLDGSLATHFCQDESRSSSATDIVKRVVGSAVPVLEDEATLSLRVLVDHSIVESFAQGGRSTATSRVYPTEAIYANAGVFLFNNATAARVTATKLVVHEMDSSYNHDYMAPVADI

SEQ ID NO: 279 - DNA, 2451 bp, Sorghum bicolor
atgggggaagctgccggtgaccgtgttctgagccgcctccacagcgtcagggagcgcattggcgattcactctctgcccaccccaatgagcttgtcgccgtcttcaccaggctgaaaaaccttggaaagggtatgctgcagccccaccagatcattgccgagtacaacagtgctatccctgaggctgaacgtgagaagctgaaggatggtgcctttgaggatgtcctgagggcagctcaggaagcaattgttatccccccatgggttgcacttgccatccgccctaggcctggtgtctgggagtatgtgagggtcaacgtcagcgagctcgctgttgaggagctgagagtccctgagtacctgcagttcaaggaacagcttgtggaagaaggccccaacaacaactttgttcttgagctggactttgagccattcaatgcgtccttcccccgtccttctctgtcaaagtccattggcaatggtgtgcagttcctcaacaggcacctgtcatcaaagctcttccatgacaaggagagcatgtaccccttgctcaacttccttcgtgcccacaactacaaggggatgaccatgatgttgaacgacagaatccgcagtctcagtgctctgcaaggcgctctgaggaaggctgaggagcacctgtccaccctccaagctgataccccatactctgaatttcaccacaggttccaggaacttggtctggagaagggttggggtgactgcgctaagcgcgcacaggagactattcacctcctcttggaccttcttgaggccccagatccgtccaccctggagaagttccttggaacgatccccatggtgttcaatgttgttatcctctcccctcatggttactttgctcaagctaatgtcttgggttaccctgacaccggaggccaggttgtgtacattttggaccaagtccgtgctatggagaatgaaatgctgctgaggatcaagcagtgtggtcttgacatcacaccaaagatccttattgttaccaggttgcttcctgatgcaactggcaccacctgtggtcagcgtcttgagaaggtccttggcactgagcactgccatatccttcgtgtgccattcagaacagaaaatggaattgttcgcaagtggatctcgcgttttgaagtctggccttacctggagacttacactgatgatgtggcacatgagattgctggagagcttcaggccaatcctgacctgatcatcggaaactacagtgatggaaaccttgtcgcatgtttgctcgcgcacaagatgggtgttactcactgtaccattgcccacgcccttgagaaaactaagtaccctaactctgacctctactggaagaagtttgaggaccactaccacttctcgtgccagttcaccactgacttgattgctatgaaccatgctgacttcattatcaccagtaccttccaagagattgctggaaacaaggacaccgtcggtcagtacgagtcacacatggcattcacaatgcctggtctgtaccgcgttgtccacggtattgatgtgtttgaccctaagttcaacatcgtgtctcctggtgcggacttgtccatctacttcccatacaccgagtcacacaagaggttgacctccctccacccggagattgaggagctcctgtacagccaaaccgagaacaccgagcacaagtttgtgctgaacgacaggaacaagccaatcatcttctccatggctcgtcttgaccgcgtcaagaacttgactggtctggtggagctttatggccggaacaagcgcctgcaggagctggtgaacctcgtggttgtgtgcggtgaccacggcaacccgtccaaggacaaggaggagcaggccgagttcaagaagatgtttgacctcatcgagcagtacaacctgaacgggcacatccgctggatctccgcccagatgaaccgtgtccgcaacggtgagctgtaccgctacatttgcgacaccaagggtgccttcgtgcagcctgctttctacgaggcgttcgggctgacggtggttgaggccatgacctgtggcctgcccacgttcgccaccgcctatggtggtccggctgagatcatcgtgcacggcgtgtctggcttccacattgacccgtaccagggcgacaaggcgtcggcgctgctcgtggacttctttgagaagtgccagacggattcgagccactggaacaaaatctcccagggcgggctccagcgtatcgaggagaaatacacctggaagctgtactcggagaggctgatgaccctgacgggcgtgtatggtttctggaagtacgtgtccaacctggagaggcgcgagacccggcggtacctggagatgctgtacgcgctcaagtaccgcaccatggccagcaccgtgccgttggccgtggagggagagccctccagcaagtga

SEQ ID NO: 280 - protein, 816 aa, Sorghum bicolor
MGEAAGDRVLSRLHSVRERIGDSLSAHPNELVAVFTRLKNLGKGMLQPHQIIAEYNSAIPEAEREKLKDGAFEDVLRAAQEAIVIPPWVALAIRPRPGVWEYVRVNVSELAVEELRVPEYLQFKEQLVEEGPNNNFVLELDFEPFNASFPRPSLSKSIGNGVQFLNRHLSSKLFHDKESMYPLLNFLRAHNYKGMTMMLNDRIRSLSALQGALRKAEEHLSTLQADTPYSEFHHRFQELGLEKGWGDCAKRAQETIHLLLDLLEAPDPSTLEKFLGTIPMVFNVVILSPHGYFAQANVLGYPDTGGQVVYILDQVRAMENEMLLRIKQCGLDITPKILIVTRLLPDATGTTCGQRLEKVLGTEHCHILRVPFRTENGIVRKWISRFEVWPYLETYTDDVAHEIAGELQANPDLIIGNYSDGNLVACLLAHKMGVTHCTIAHALEKTKYPNSDLYWKKFEDHYHFSCQFTTDLIAMNHADFIITSTFQEIAGNKDTVGQYESHMAFTMPGLYRVVHGIDVFDPKFNIVSPGADLSIYFPYTESHKRLTSLHPEIEELLYSQTENTEHKFVLNDRNKPIIFSMARLDRVKNLTGLVELYGRNKRLQELVNLVVVCGDHGNPSKDKEEQAEFKKMFDLIEQYNLNGHIRWISAQMNRVRNGELYRYICDTKGAFVQPAFYEAFGLTVVEAMTCGLPTFATAYGGPAEIIVHGVSGFHIDPYQGDKASALLVDFFEKCQTDSSHWNKISQGGLQRIEEKYTWKLYSERLMTLTGVYGFWKYVSNLERRETRRYLEMLYALKYRTMASTVPLAVEGEPSSK

SEQ ID NO: 281 - DNA, 2451 bp, Zea mays
atgggggaaggtgcaggtgaccgtgtcctgagccgcctccacagcgtcagggagcgcattggcgactcactctctgcccaccccaatgagcttgtcgccgtcttcaccaggctgaaaaaccttggaaagggtatgctgcagccccaccagatcattgccgagtacaacaatgcgatccctgaggctgagcgcgagaagctcaaggatggtgcttttgaggatgtcctgagggcagctcaggaggcgattgtcatccccccatgggttgcacttgccatccgccctaggcctggtgtctgggagtatgtgagggtcaacgtcagtgagctcgctgttgaggagctgagagttcctgagtacctgcagttcaaggaacagcttgtggaagaaggccccaacaacaactttgttcttgagctggactttgagccattcaatgcctccttcccccgtccttctctgtcaaagtccattggcaatggcgtgcagttcctcaacaggcacctgtcatcaaagctcttccatgacaaggagagcatgtaccccttgctcaacttccttcgcgcccacaactacaaggggatgaccatgatgttgaacgacagaatccgcagtctcagtgctctgcaaggtgcgctgaggaaggctgaggagcacctgtccaccctacaagctgataccccatactctgaatttcaccacaggttccaggaacttggtctggagaagggttggggtgattgcgctaagcgtgcacaggagactatccacctcctcttggacctcctggaggccccagatccgtccaccctggagaagttccttggaacgatccccatggtgttcaatgtcgttatcctctcccctcatggttacttcgctcaagctaatgtcttgggttaccctgacaccggaggccaggttgtctacatcttggatcaagtgcgcgctatggagaacgaaatgctgctgaggatcaagcagtgtggtcttgacatcacgccgaagatccttattgtcaccaggttgctccctgatgcaactggcaccacctgtggccagcgccttgagaaggtccttggcaccgagcactgccatatccttcgcgtgccattcagaacagaaaacggaatcgttcgcaagtggatctcgcgatttgaagtctggccgtacctggagacttacactgatgacgtggcgcatgagattgctggagagcttcaggccaatcctgacctgatcatcggaaactacagtgacggaaaccttgttgcgtgtttgctcgcccacaagatgggtgttactcactgtaccattgcccatgcgcttgagaaaactaagtaccctaactccgacctctactggaagaagtttgaggatcactaccacttctcgtgccagttcaccactgacttgattgcaatgaaccatgccgacttcatcatcaccagtaccttccaagagatcgccggaaacaaggacaccgtcggccagtacgagtcacacatggcgttcacaatgcctggcctgtaccgcgttgtccacggcattgatgtgttcgaccccaagttcaacatcgtgtctcctggcgcggacctgtccatctacttcccgtacaccgagtcgcacaagaggctgacctcccttcacccggagattgaggagctcctgtacagccaaaccgagaacacggagcacaagttcgttctgaacgacaggaacaagccaatcatcttctccatggctcgtctcgaccgtgtgaagaacttgactgggctggtggagctgtacggccggaacaagcggctgcaggagctggtgaacctcgtggtcgtctgcggcgaccatggcaacccttccaaggacaaggaggagcaggccgagttcaagaagatgtttgacctcatcgagcagtacaacctgaacgggcacatccgctggatctccgcccagatgaaccgcgtccgcaacggcgagctgtaccgctacatctgcgacaccaagggcgccttcgtgcagcctgctttctacgaggctttcgggctgacggtggttgaggccatgacctgcggcctgcccacgttcgccaccgcctacggcggtccggccgagatcatcgtgcacggcgtgtctggctaccacatcgacccttaccagggcgacaaggcgtcggccctgctcgtggacttcttcgacaagtgccaggcggagccgagccactggagcaagatctcccagggcgggctccagcgtatcgaggagaagtacacctggaagctgtactcggagaggctgatgaccctcaccggcgtgtacgggttctggaagtacgtgtccaacctggagaggcgcgagacccggcggtacctggagatgctgtacgcgctcaagtaccgcaccatggcgagcaccgtgccgctggccgtggagggagagccctccagcaagtga

SEQ ID NO: 282 - protein, 816 aa, Zea mays
MGEGAGDRVLSRLHSVRERIGDSLSAHPNELVAVFTRLKNLGKGMLQPHQIIAEYNNAIPEAEREKLKDGAFEDVLRAAQEAIVIPPWVALAIRPRPGVWEYVRVNVSELAVEELRVPEYLQFKEQLVEEGPNNNFVLELDFEPFNASFPRPSLSKSIGNGVQFLNRHLSSKLFHDKESMYPLLNFLRAHNYKGMTMMLNDRIRSLSALQGALRKAEEHLSTLQADTPYSEFHHRFQELGLEKGWGDCAKRAQETIHLLLDLLEAPDPSTLEKFLGTIPMVFNVVILSPHGYFAQANVLGYPDTGGQVVYILDQVRAMENEMLLRIKQCGLDITPKILIVTRLLPDATGTTCGQRLEKVLGTEHCHILRVPFRTENGIVRKWISRFEVWPYLETYTDDVAHEIAGELQANPDLIIGNYSDGNLVACLLAHKMGVTHCTIAHALEKTKYPNSDLYWKKFEDHYHFSCQFTTDLIAMNHADFIITSTFQEIAGNKDTVGQYESHMAFTMPGLYRVVHGIDVFDPKFNIVSPGADLSIYFPYTESHKRLTSLHPEIEELLYSQTENTEHKFVLNDRNKPIIFSMARLDRVKNLTGLVELYGRNKRLQELVNLVVVCGDHGNPSKDKEEQAEFKKMFDLIEQYNLNGHIRWISAQMNRVRNGELYRYICDTKGAFVQPAFYEAFGLTVVEAMTCGLPTFATAYGGPAEIIVHGVSGYHIDPYQGDKASALLVDFFDKCQAEPSHWSKISQGGLQRIEEKYTWKLYSERLMTLTGVYGFWKYVSNLERRETRRYLEMLYALKYRTMASTVPLAVEGEPSSK

SEQ ID NO: 283 - DNA, 1680 bp, Sorghum bicolor
atggagctggctgtcggcggcgggatgcggcggtcggcgtcgcacacctcgctgtcggagtcggacgacttcgagctcacgcggctgctcagcaagccgcggatcaacgtcgagcgccagcgctccttcgacgaccgctcgctcagcgacgtctcgcactcgggcggctacggcaggggaggcttcgacggcatgtactcgcctgggggcggcctgcgctccctcgtcggcacgccggcatcctccgcgctgcactccttcgagccccaccccatcgtcggcgacgcatgggaggcgctccgccgctcactcgtcttctttcgcggccagccccttggcaccgtcgccgccgtcgaccacgcttccgaggaagtcctcaactacgaccaagtgtttgtgagggatttcgtgccgagcgcgctggcgtttctgatgaatggcgagccggatatcgtcaagaacttccttctgaagaccctgctgctgcagggctgggagaagaaagtcgaccggttcaagcttggggagggagccatgccggctagcttcaaggtgatgcatgacgccaagaagggggtcgagaccctacatgctgattttggagagagcgccattgggagggttgcgcctgtggattctggtttctggtggatcatactcctccgggcgtacacaaaaaccaccggtgatatgaccctggcagagacaccggagtgccagaaagggatgaggctcatactcagcctgtgcttatctgaggggtttgataccttcccgacattgttatgtgctgatggttgctgtatgatagatcgcagaatgggtgtatatggataccctattgagattcaagcccttttctttatggcactaaggtgtgctcttcaaatgcttaagcatgataatgaagggaaggaatttgtagagaagattgctacccgccttcatgctttaagttatcacatgcgaagttatttttggctcgatttccaacagctaaatgacatttatcgttacaagacagaagaatattcccacacagccgtcaacaaattcaatgttattcctgattcaattccggactggctatttgactttatgccttgtcagggtgggtttttcattggtaatgttagtcctgccaggatggacttccgatggtttgcacttggaaacatgattgctatactttcttctcttgcaacacctgagcaatctgttgctataatggatcttattgaggagcgttgggaagagcttatcggtgatatgcctctgaagatatgttatcctgctattgagaaccatgaatggcgaattgtgacaggctgtgatccaaaaaatactagatggagctatcacaatggaggatcgtggccagtacttctgtggctgctgactgcagcctgcatcaaaactggacggccgcaaattgcaagaagagcaattgacctagcagagaggaggctgttgaaggatggctggcctgagtactatgacgggaagcttggtcggtatgttggcaagcaggcaaggaaattccagacttggtccatcgcggggtatttggtcgccaagatgatgttggaagatccttcacatcttggcatgatctccctagaagaggataaggcgatgttgaagcctgttttgaagcggtccgcatcatggacaaactaa

SEQ ID NO: 284 - protein, 559 aa, Sorghum bicolor
MELAVGGGMRRSASHTSLSESDDFELTRLLSKPRINVERQRSFDDRSLSDVSHSGGYGRGGFDGMYSPGGGLRSLVGTPASSALHSFEPHPIVGDAWEALRRSLVFFRGQPLGTVAAVDHASEEVLNYDQVFVRDFVPSALAFLMNGEPDIVKNFLLKTLLLQGWEKKVDRFKLGEGAMPASFKVMHDAKKGVETLHADFGESAIGRVAPVDSGFWWIILLRAYTKTTGDMTLAETPECQKGMRLILSLCLSEGFDTFPTLLCADGCCMIDRRMGVYGYPIEIQALFFMALRCALQMLKHDNEGKEFVEKIATRLHALSYHMRSYFWLDFQQLNDIYRYKTEEYSHTAVNKFNVIPDSIPDWLFDFMPCQGGFFIGNVSPARMDFRWFALGNMIAILSSLATPEQSVAIMDLIEERWEELIGDMPLKICYPAIENHEWRIVTGCDPKNTRWSYHNGGSWPVLLWLLTAACIKTGRPQIARRAIDLAERRLLKDGWPEYYDGKLGRYVGKQARKFQTWSIAGYLVAKMMLEDPSHLGMISLEEDKAMLKPVLKRSASWTN

SEQ ID NO: 285 - DNA, 1680 bp, Zea mays
atggagctggctgtcggcggcgggatgcggcggtcggcgtcgcacacctcgctgtcggagtcggatgacttcgagctcacgcggctgctcagcaagccgcggatcaacgtcgagcgccagcgctccttcgacgaccgctcgcttagcgacgtctcgcactcgggcgggtacggcaggggaggcttcgacggcatgtactcgcctgggggcggcctgcgctccctcgtcggcacgccggcctcctccgggctgcactccttcgagccccaccccatcgtcggcgacgcctgggaggcgctccgccgctccctcgtcttgttccgcggccagccccttggcaccgttgccgccgtcgaccacgcgtccgaggaagtcctcaactacgaccaagtgtttgtgagggatttcgtgccgagcgcgctggcgtttctgatgaatggcgagccagatatcgtcaagaacttccttctgaagaccctgctgctgcagggctgggagaagaaagtcgaccggttcaagctcggggagggtgccatgccggctagcttcaaggttatgcatgacgccaagaagggggtcgagaccctacatgctgattttggggagagcgccattgggagggttgcgcctgtggattcggggttctggtggatcatactcctccgggcctacacaaaaaccaccggtgatttgacgctggcagagacgccggagtgccagaaagggatgaggctcatactcagcctgtgcttatccgaggggttcgataccttcccgacattgttatgtgctgatggttgctgtatgatagatcgcagaatgggtgtatatggctaccctattgagattcaggcccttttctttatggcactaaggtgtgctcttcaaatgcttaagcatgataatgaagggaaggagtttgtagagaagattgctactcgccttcacgctttaagttatcacatgcggagttatttttggctcgatttccaacagctaaatgacatctatcgttacaagacagaagaatattcccacactgctgtcaacaaattcaatgtcattcctgattcaattccggattggctatttgactttatgccttgtcagggtgggtttttcattggtaatgtcagtcctgccaggatggacttccgatggttcgcacttggaaacatgattgctatactttcttcccttgcaacacctgagcaatctgttgctataatggatcttattgaggagcgttgggaagagctcattggtgaaatgcctctgaagatatgttatcctgctattgagaaccatgaatggcgaattgtgacgggctgtgatccaaaaaacactagatggagttatcataatggaggatcgtggccagtacttctgtggctgctgactgcagcctgcatcaaaactggacggccacaaatcgcaagaagggcaattgacctagcagaaaggaggctgttgaaggatggatggcctgagtactatgatgggaagcttggtcggtatgttggcaagcaggcgaggaaattccagacctggtccatcgcggggtatttggtcgccaagatgatgttggaagatccttcacatctcggcatgatctccctggaagaggatagggcaatgttgaagcctgttttgaagcggtctgcgtcatggacaaactga

SEQ ID NO: 286 - protein, 559 aa, Zea mays
MELAVGGGMRRSASHTSLSESDDFELTRLLSKPRINVERQRSFDDRSLSDVSHSGGYGRGGFDGMYSPGGGLRSLVGTPASSGLHSFEPHPIVGDAWEALRRSLVLFRGQPLGTVAAVDHASEEVLNYDQVFVRDFVPSALAFLMNGEPDIVKNFLLKTLLLQGWEKKVDRFKLGEGAMPASFKVMHDAKKGVETLHADFGESAIGRVAPVDSGFWWIILLRAYTKTTGDLTLAETPECQKGMRLILSLCLSEGFDTFPTLLCADGCCMIDRRMGVYGYPIEIQALFFMALRCALQMLKHDNEGKEFVEKIATRLHALSYHMRSYFWLDFQQLNDIYRYKTEEYSHTAVNKFNVIPDSIPDWLFDFMPCQGGFFIGNVSPARMDFRWFALGNMIAILSSLATPEQSVAIMDLIEERWEELIGEMPLKICYPAIENHEWRIVTGCDPKNTRWSYHNGGSWPVLLWLLTAACIKTGRPQIARRAIDLAERRLLKDGWPEYYDGKLGRYVGKQARKFQTWSIAGYLVAKMMLEDPSHLGMISLEEDRAMLKPVLKRSASWTN

SEQ ID NO: 287 - DNA, 1785 bp, Sorghum bicolor
atggacgccggcaccgggggcggcgggccaacggccatccgcgtgccctaccgccacctccgcgacgccgagatggagctcgtcagcctcaacggagcggacgcgggcccgacgccgcacaaggacgcggaccagccgcggagccgcggcgccaacgccgacaggaccaagctcgtgcttgcctgcatggtcgccgcgggcgtccagttcgggtgggcactgcagctctccctcctcacgccatacatccagaccctaggaatagaccatgccatggcatcatttatttggctctgtgggccaataactggttttgtggttcaaccttgtgttggtgtttggagtgataagtgccgatcaaagtatgggaggagaaggccatttattttggctggatgcataatgatatgtgctgctgtaactttaatcgggttttctgcagacctcggttacatcttaggggataccaccgagcactgcagaacatataaaggttcaagatttcgagctgctatggttttcattctaggattctggatgttggacctggcaaacaatacagtgcaaggtcctgctcgtgctcttctagctgatctttcaggtcctgatcagtgtaattctgcaaatgcaatattctgctcatggatggctgttggaaatattcttggtttttcagctggtgcaagcggggattggcacaagtggtttccttttctaatgactagagcctgctgtgaagcttgtggtaatttgaaagcagctttcttagttgcagtcgtatttcttttgttctgtatgtctgttacgctgtacttcgctgaagagatcccactagagccaaaagatgcacaaggactgtcagattctgctcctctactgaacggttctagagaggatgcacatgcattgaatgaaccaaataatgaaagatttcctaatggccatgtagatggaaacaacgtgtcggctaacaacaacactgaggaatttccaaatgcgaattccaacacagacaatggaggagtcttcaatgatggacctggagcagttttggttaacattttgaccagcatgaggcatctacctcctgggatgcattcagtgcttgtagttatggccctaacatggttgtcatggtttcccttttttctttttgacactgactggatggggcgtgaagtttaccatggggatccaaatggagatctgagtgagaggaaagcttatgacaatggtgtccgagaaggtgcatttggtttgctattgaattcagttgtccttggcgttggttccttccttgttgatccactatgccggatgattggtgcaagattggtttgggccattagcaacttcactgtgtttatttgcatgatggctacaacaatactaagttggatctcttctgatctgtactcaagcaaactccatcacatcattggggcaaataaaacagtcaagactacagcattggttgttttctctcttctcggactgccactctcgatcacttatagcgttccattttctgtgactgctgagctgactgctggtacaggaggtggacaaggtctggccacaggagtcctaaatctcgctattgttgttccccagatagtagtgtcactcggagcaggtccatgggatgctctatatgggggaggaaacatcccagcgttcgccttggcttcggtcttctccctggcggcaggtgtgctcgcagttctcaagctaccaaagctgtcgaactcgtaccaatctgccggtttccatggatttggctga

SEQ ID NO: 288 - protein, 594 aa, Sorghum bicolor
MDAGTGGGGPTAIRVPYRHLRDAEMELVSLNGADAGPTPHKDADQPRSRGANADRTKLVLACMVAAGVQFGWALQLSLLTPYIQTLGIDHAMASFIWLCGPITGFVVQPCVGVWSDKCRSKYGRRRPFILAGCIMICAAVTLIGFSADLGYILGDTTEHCRTYKGSRFRAAMVFILGFWMLDLANNTVQGPARALLADLSGPDQCNSANAIFCSWMAVGNILGFSAGASGDWHKWFPFLMTRACCEACGNLKAAFLVAVVFLLFCMSVTLYFAEEIPLEPKDAQGLSDSAPLLNGSREDAHALNEPNNERFPNGHVDGNNVSANNNTEEFPNANSNTDNGGVFNDGPGAVLVNILTSMRHLPPGMHSVLVVMALTWLSWFPFFLFDTDWMGREVYHGDPNGDLSERKAYDNGVREGAFGLLLNSVVLGVGSFLVDPLCRMIGARLVWAISNFTVFICMMATTILSWISSDLYSSKLHHIIGANKTVKTTALVVFSLLGLPLSITYSVPFSVTAELTAGTGGGQGLATGVLNLAIVVPQIVVSLGAGPWDALYGGGNIPAFALASVFSLAAGVLAVLKLPKLSNSYQSAGFHGFG

SEQ ID NO: 289 - DNA, 1779 bp, Zea mays
atggacgccggcgccggggccacggccatccgagtgccctaccgccacctccgcgacgccgagatggagctcgtcagcctcaacggcggcgctcccggaggggacacgggcccgcccccgccaccgcccaaggaccagccgcggagccgcgccgacaggaccaagctcgtgctcgcctgcatggtcgccgcgggcgtccagttcggatgggcgctgcagctctccctccttacgccatacatccagaccctaggaatagaccatgccatggcatcatttatttggttgtgtgggcctataactggttttgtggttcaaccttgtgttggtgtttggagtgataagtgccgttcaaagtatgggaggagaagaccatttattttggctggatgcataatgatatgtgctgctgtaactctaatcgggttttctgcagacctcggttacatcttaggggacaccactgagcactgcagaacatataaaggttcaaggtttcgagctgctattgttttcattctaggattctggatgttggacctggcaaacaatacagtgcaaggtcctgcgcgtgctcttctagctgatctttcaggtcctgatcagtgcaattctgcaaatgcaatattctgctcatggatggctgttgggaatattcttggtttttcagctggagcgagtggggaatggcacaagtggtttccatttctaacgacaagagcatgctgtgaagcttgcggtaatttgaaagcagctttcttagttgcagttgtatttcttttgttatgtatgtctgttaccctgtacttcgctgaagagagcccactagatccaaaagatacacaaggactatcagattctgctcctctgctgaacggttctagagatgctgcccatgcatcaaatgaaccaaataatgaaagatttcctaatggccatgtgggtttaaacaatgtgtcggctaacaacaacactgaggaatttacaaatgtgaattccaacacagagaaaggaggagtcttcaatgatgggccaggagcagttttggttaacattttgaccagaatgaggcatctacctcctgggatgcattcagtgcttctagttatggccctaacatggttgtcatggtttccctttttcctttttgacactgactggatgggacgcgaagtttaccatggggatccaaatggagatttgagtgagaggaaagcttatgacaatggtgtccgagaaggtgcatttggtttgctattgaattcagttgtccttggcgttggttcattccttgttgatccactatgccggatgattggtgcaagattagtttgggccattagcaacttcacggtgtttatttgcatgatggctacaacgatattaagttggatctcttctgatctgtactcaagcaaacttcatcacatcatcggggcaaataaaacagtcaagatcacggcattggttgttttctctcttctcggattgccactctccatcacttacagcgttccgttttctgtgactgctgagctgactgccggtacaggaggtggacaaggtttggccacaggagtcctaaatcttgctatcgtggttccccagatagtagtgtcgcttggagcaggtccatgggacgctctgtatggaggagggaataccccggcgttcgtcttggcttcggtcttctccctggcagcaggtgtgctcgcagttctcaagctgccaaagctgtccaactcgtaccaatctgccgggttccatggatttggctga

SEQ ID NO: 290 - protein, 592 aa, Zea mays
MDAGAGATAIRVPYRHLRDAEMELVSLNGGAPGGDTGPPPPPPKDQPRSRADRTKLVLACMVAAGVQFGWALQLSLLTPYIQTLGIDHAMASFIWLCGPITGFVVQPCVGVWSDKCRSKYGRRRPFILAGCIMICAAVTLIGFSADLGYILGDTTEHCRTYKGSRFRAAIVFILGFWMLDLANNTVQGPARALLADLSGPDQCNSANAIFCSWMAVGNILGFSAGASGEWHKWFPFLTTRACCEACGNLKAAFLVAVVFLLLCMSVTLYFAEESPLDPKDTQGLSDSAPLLNGSRDAAHASNEPNNERFPNGHVGLNNVSANNNTEEFTNVNSNTEKGGVFNDGPGAVLVNILTRMRHLPPGMHSVLLVMALTWLSWFPFFLFDTDWMGREVYHGDPNGDLSERKAYDNGVREGAFGLLLNSVVLGVGSFLVDPLCRMIGARLVWAISNFTVFICMMATTILSWISSDLYSSKLHHIIGANKTVKITALVVFSLLGLPLSITYSVPFSVTAELTAGTGGGQGLATGVLNLAIVVPQIVVSLGAGPWDALYGGGNTPAFVLASVFSLAAGVLAVLKLPKLSNSYQSAGFHGFG

SEQ ID NO: 291 - DNA, 693 bp, Arabidopsis thaliana
atggcagacttgagtttttatgtcggagtcatagggaatgttatatcggtgcttgtcttcctctcccctgtggagacgttttggaggatagtgcagcggagatcgacggaggaatacgagtgttttccgtacatttgcacgttaatgagctcgtcgttatggacatattacggaatagtgacacctggtgaatacttggtttctactgtcaatggctttggtgctcttgctgaatccatctacgttctcattttcctcttctttgtccccaaatccagattcttgaaaacagttgttgtggttctagctttgaacgtgtgtttcccagttatcgcgattgcgggaacaagaactctgtttggagatgcaaactcgcgttctagttcaatgggtttcatatgtgctactctcaacattatcatgtatggttctcctctttcagctattaaaacggttgtgacgacgagaagtgtgcagtttatgccattttggttgtcatttttcctctttctgaacggcgcgatttggggtgtctacgctttactcctacacgatatgtttctactagtgccaaatggaatgggattctttcttgggataatgcaactcctaatttatgcctattacagaaatgccgaaccaattgtagaagatgaagaaggcctcataccaaatcaacctctcctcgcttaa

SEQ ID NO: 292 - protein, 230 aa, Arabidopsis thaliana
MADLSFYVGVIGNVISVLVFLSPVETFWRIVQRRSTEEYECFPYICTLMSSSLWTYYGIVTPGEYLVSTVNGFGALAESIYVLIFLFFVPKSRFLKTVVVVLALNVCFPVIAIAGTRTLFGDANSRSSSMGFICATLNIIMYGSPLSAIKTVVTTRSVQFMPFWLSFFLFLNGAIWGVYALLLHDMFLLVPNGMGFFLGIMQLLIYAYYRNAEPIVEDEEGLIPNQPLLA

SEQ ID NO: 293 - DNA, 4008 bp, Arabidopsis thaliana
atggataataacaattggaggccttctcttccaaacggagagcctgccatggatacaggtgactggagaacgcaattgccacctgattctcgtcagaagatcgtcaacaagataatggaaacactaaagaagcaccttccattttccggaccagagggaattaacgagctcaggagaattgcagctagattcgaggagaaaattttcagcggtgctcttaaccagactgattaccttcggaaaatatcaatgaagatgctgacaatggagactaaatcacaaaatgcagctggttcttccgcagctatccctgccgctaataatggcacatccatagattcgatacccaccaatcaaggccaacttcttccaggatcgttatcaaccaatcaatctcaagcacctcagccgttgctgtcccaaaccatgcagaataatactgcctctggaatgacgggttctactgctttaccatcttccatgccacctgtttcttccataaccaataataacaccacaagcgttgtgaaccagaatgccaatatgcaaaatgtagctggaatgttgcaagattcatctgggcagcatggcctttcctcgaacatgttttcaggaccccaaaggcagatgctgggtaggccacatgctatgtcttcacagcaacaacagcagccatatctttaccagcagcagctacagcagcaacttctcaagcagaacttccagtcagggaatgttcccaatcccaattcgcttttgccatcacacattcaacaacagcagcaaaatgtgctgcagcctaatcaactgcattcatctcaacaacctggtgttccaacatctgcgactcagccctccactgtgaactcagctcctctccaaggtctccacaccaatcagcaatcaagtccgcaattgtcttctcagcagacgacacaatctatgcttcgtcagcatcaatcgtcgatgctaaggcaacatccgcaatcacaacaagcctctggtatccatcagcagcaatcttcattgccgcaacaatcaatttctcctctacagcagcagcctacacaattaatgcggcaacaagctgcaaatagctcaggcatccaacagaagcagatgatggggcagcatgttgttggggatatgcagcagcaacatcagcaaaggttactgaaccaacaaaataatgttatgaacatacaacagcagcagtcgcagcagcaaccactgcagcagccacagcaacagcagaaacagcagccaccggcccagcagcagttgatgtctcaacaaaacagcctccaggcaacgcatcagaacccactgggcactcaaagcaatgttgcaggattgcagcaaccacaacaacagatgctcaattcccaggttggcaattcgagtttgcagaataaccagcactcggtgcacatgttatcacaaccaacggttgggctgcaacgaacacatcaggctggccatggcttgtattcttctcagggacaacagtcacaaaatcagccatcacaacagcagatgatgccacagcttcaatcgcatcatcagcagctgggtttgcaacaacaacctaatctgctacaacaggatgtgcaacaaaggctacaagcttcaggccaagtcactggttccctgcttccacctcaaaatgttgtggaccaacagagacaactatatcaatcccaaagaacccttccggagatgccatcatcatcgctggattcgacagcacagacggaaagtgcaaatggaggtgattggcaagaggaggtttaccaaaagatcaaatctatgaaagagacttacttaccagatctgaatgaaatctaccagagagttgcagcaaagttgcagcaagattctatgccacagcaacaaagatcagatcagcttgagaaactgagacaattcaaaacaatgttggagcgaatgatacaatttctatctgtttcaaagagcaacatcatgcccgcattaaaagataaggtggcttattatgagaagcagattataggtttcttaaatatgcacaggccgaggaagccagtacagcaagggcagcttccgcaatctcagatgcagcctatgcagcaaccacaatctcagacagttcaagatcaatcccatgataaccaaacaaatccgcagatgcaatcaatgagcatgcagggtgctgggccaagggcacaacagagtagtatgacaaatatgcagagcaatgttctatcatctcgtcctggagtttcagctccacagcagaacattcccagttccataccggcttctagtttagaatcaggccaaggaaataccttgaacaatggacagcaggttgccatgggatctatgcaacaaaatacttctcaactagtaaataacagttctgcctctgctcaaagtgggttgagcacactgcagtcgaatgtgaatcaaccccagttaagttccagtttgcttcagcatcagcacctcaagcaacagcaagatcaacaaatgcagctcaaacagcaatttcaacagcgccagatgcaacagcaacagttgcaagcaagacagcaacagcaacagcaacagttgcaagcaagacagcaagcggcacaattacagcagatgaatgatatgaatgatttaacatcgaggcaggggatgaatgtcagtcgtgggatgtttcagcaacattctatgcagggtcagcgtgcgaattatcctcttcaacagttaaaaccaggagctgtttcgtcgcctcaacttctgcaaggtgcatctcctcagatgtcacaacatttgtctcctcaggttgaccagaaaaatactgtcaacaagatgggaactccattgcaacctgcaaattccccttttgttgtcccatctccttcttcaacccccttggctccgtcccctatgcaagttgactctgagaaacctggttcttcttcgttgtcaatgggaaatattgcacgccaacaagcaaccggcatgcaaggtgtagttcagtccctagcaattggcactccagggatctctgcctctcctctccttcaggagtttactagtcctgatgggaatattttaaattcttcgacaattacatctggaaaaccgagtgctactgagctgcctattgaacgccttattagagccgtgaagtccatctcaccacaagccctttcttctgcagtaagtgacatcggatctgttgtaagcatggttgatcggatagctggttcagcaccaggaaacggttcaagagcttccgttggtgaagacttggttgcaatgactaagtgccgtctccaagcaagaaacttcatgacccaagagggaatgatggcgactaagaaaatgaagcgtcacacaaccgcaatgccactaagcgttgcttcactgggaggaagtgttggtgataactacaagcagtttgctggttcagaaacatccgatctagaatctactgcgacttcggatggcaagaaggcaagaactgagaccgagcatgcccttttggaggaaataaaggaaataaaccagcggctgatagatacagttgttgagataagtgatgatgaagatgctgctgatcctagtgaggttgcaatatcaagcatagggtgtgaaggaacaacagttagattctcgtttatagctgtttctctcagcccagccttgaaggctcatctctcatcaacacaaatgtctcctattcaaccattgcgtctgctggttccttgtagctaccccaatggctctccatctcttctagataaactcccggtcgaaaccagcaaagaaaacgaggacctgtcgtccaaagctatggcaaggttcaacatattgctaagaagtttgtcacagccgatgtcgctcaaagacatagccaagacatgggacgcctgtgctcgggcagtgatctgtgagtacgcacagcaatttggcggtggaactttcagctcaaaatacggcacttgggagaaatatgtagcagcttcctga

SEQ ID NO: 294 - protein, 1335 aa, Arabidopsis thaliana
MDNNNWRPSLPNGEPAMDTGDWRTQLPPDSRQKIVNKIMETLKKHLPFSGPEGINELRRIAARFEEKIFSGALNQTDYLRKISMKMLTMETKSQNAAGSSAAIPAANNGTSIDSIPTNQGQLLPGSLSTNQSQAPQPLLSQTMQNNTASGMTGSTALPSSMPPVSSITNNNTTSVVNQNANMQNVAGMLQDSSGQHGLSSNMFSGPQRQMLGRPHAMSSQQQQQPYLYQQQLQQQLLKQNFQSGNVPNPNSLLPSHIQQQQQNVLQPNQLHSSQQPGVPTSATQPSTVNSAPLQGLHTNQQSSPQLSSQQTTQSMLRQHQSSMLRQHPQSQQASGIHQQQSSLPQQSISPLQQQPTQLMRQQAANSSGIQQKQMMGQHVVGDMQQQHQQRLLNQQNNVMNIQQQQSQQQPLQQPQQQQKQQPPAQQQLMSQQNSLQATHQNPLGTQSNVAGLQQPQQQMLNSQVGNSSLQNNQHSVHMLSQPTVGLQRTHQAGHGLYSSQGQQSQNQPSQQQMMPQLQSHHQQLGLQQQPNLLQQDVQQRLQASGQVTGSLLPPQNVVDQQRQLYQSQRTLPEMPSSSLDSTAQTESANGGDWQEEVYQKIKSMKETYLPDLNEIYQRVAAKLQQDSMPQQQRSDQLEKLRQFKTMLERMIQFLSVSKSNIMPALKDKVAYYEKQIIGFLNMHRPRKPVQQGQLPQSQMQPMQQPQSQTVQDQSHDNQTNPQMQSMSMQGAGPRAQQSSMTNMQSNVLSSRPGVSAPQQNIPSSIPASSLESGQGNTLNNGQQVAMGSMQQNTSQLVNNSSASAQSGLSTLQSNVNQPQLSSSLLQHQHLKQQQDQQMQLKQQFQQRQMQQQQLQARQQQQQQQLQARQQAAQLQQMNDMNDLTSRQGMNVSRGMFQQHSMQGQRANYPLQQLKPGAVSSPQLLQGASPQMSQHLSPQVDQKNTVNKMGTPLQPANSPFVVPSPSSTPLAPSPMQVDSEKPGSSSLSMGNIARQQATGMQGVVQSLAIGTPGISASPLLQEFTSPDGNILNSSTITSGKPSATELPIERLIRAVKSISPQALSSAVSDIGSVVSMVDRIAGSAPGNGSRASVGEDLVAMTKCRLQARNFMTQEGMMATKKMKRHTTAMPLSVASLGGSVGDNYKQFAGSETSDLESTATSDGKKARTETEHALLEEIKEINQRLIDTVVEISDDEDAADPSEVAISSIGCEGTTVRFSFIAVSLSPALKAHLSSTQMSPIQPLRLLVPCSYPNGSPSLLDKLPVETSKENEDLSSKAMARFNILLRSLSQPMSLKDIAKTWDACARAVICEYAQQFGGGTFSSKYGTWEKYVAAS

SEQ ID NO: 295 - DNA, 3927 bp, Zea mays
atggacagcgccgccaactggcggtcaacgcagggcaccgaccctgccgccggcggcgtcgatccaaacgcggctgcccccgccggaagcgactggcgcacccagcttcagccagaggcgcgccacaggatcgtgaataagataatggagactctgaagaagcacctgccagtatcagtaccagaggggctgactgagcttcacaaaattgctgtgcgttttgaagagaaaatctatactgcagccaccagccagtctgattatttgcggaagatttcgctgaaaatgctgtccatggaaagtcagacaaagacacaacagaaccctggaaatgttcaagtgattccaaatcaaaaccctcctggtccagcacctggccttcctccacaagttagtaatccagcacagtcatcagctatcccattgatttctcagcaacagacacggcaatcaaatgcctctacatctgttcaaggttctcttcctagtcttggtcagaactcgtcgagtgtcagccaggcatcgacgctgcataatatgtctgtcatgccacaaaataccatgaacaatggtttagcacaaggtactccacaagatatgtatgctgcacaaaggcaaatggctggtaggcagcagcaacaacaacaacaacaagcacataatcagttaatttatcaacaacagaaatacttgaaccagaaattgcagcagaattcacttatgccatcgcacattcagcagcagcaacctttattgcagtcaacacagatgcaatcttcacagcagcccatgatgcaaatgtcatctggtcttcagcctgggcagactgccattccacaaactcagtccatgacgatgcattcagctacacaaagtggtattcaacaaaacccattgaattcagtacaacaatctgtgcaaccattactccatcagcctacacaatctgtagtgaggcagcagcaacatccacagtccatgcaccagcagtcttctctgcagcaaactcagccaactcaacagcccaacattcctttgcaacaacaacaaccacaattaatgaaccagcagtcaaatttacagcaaaatcagttaatgaatcaacagagtggtgttgtggagacgcaacagcaacaaaggctgccagttcagtcaaataatcttttgaatatgcagcaaacacagcagatgatgaaccagcaatctatgtccttgcaccagccacaacaattggcaaaccaaggaaatatgtcaagtctacatcagcagcagcatcagcaaaatcagcagcagcagcagcttctcggaactgggccaaatgcccgtatgcatatgttacagcagcaaaaggtaattcagcaaccacagcagcaacagcatgctcagcagacatcaatgggtttgatacaacctcagtctcagcagaaccaacttcagcaacctcagcaacatatgatgtcgcagttccagtctcagcctaatcaaatgcagcaacaattgggaatgcaacaaaggctccaaacttcagctggcatgctcttacaacaaaataacattgatcaaaagcaatatgttcaggcacagaggggccttcaagaagcacccagtacatctgtggattccactgctcaaactggtcatccaggcataggtgatttgcaagaggagttatatcaaatgattaagagtttaaaggaccaatactttgtggaattgaatgaattgtacaataaggtatctatcaagatacaacagattgacaaccaaatgcctgctcaaaagtcagcagagcagtatgaaaagatgaagggctttaaaggaatgctggagcgcactttgcatttcctgcaagttaacaagagcaacattcatccaggtttgagggaaaaaatccccatttacgagaggcaaattctcagtatcctaagttcacaaagaaggaaacctgtgcaggcacctgggcagcaaacgtttcagcaatctagtgggcaagctcctagctctaacatttcacagcaacttcagacttcccaaggtttgcagcagcatgatagtcatactagtcagatgcctcaagcaagtttaccaagtatgaacacaggagtacaaacctctggagcacctgcgcctcaaggaacaaactttggtgttccaacaacacagcaaaatgtcacaaatgcaccacaggctggctctaatttggagaatgctcagggaaataattttaatcatgtgcagcatggttcaatgggtgctgctttgcaacaggaaaggactggtcccatgcagggtgcattgaatgcacagcagcagtccagtagcaacatgatatccaacaatgcaatgagtacaatgcagactaataacaatgcaaatgcgaattcattgcagcagttaaagcagcaacgtcaggagcatcaaatgatgcaaagtcagcaaatgaagcagcgccagcagatgatgcaacagatacaacaaaagcaaacgcttcaaccgcagctcccaatacagcaactaaagaaacaacagcagcaagggcagatgcagtttccacagcttcattctggaaatgatgtgaatgagctaaaggttaggcaaggagctgcaatcaaatctggaatgtatcaacagctgagccagcgtaactattatcagcagataaaacagggtggtgtctttccaatttcttctccgcaaaccctccaaacatcgtccccacaaatttcacaccattctcctcaggttgatcagcacagtctgttgcaatctcaagtcaaaaccgggacaccattgcattcagctaactcaccatttgtcccatctccatcccctcctgtggccccatcaccgatgccaatggattcggataaaccactatccaacttatcttcagttactagtgctgggcaggctggacatcagcaaacatctcttgcacctcaaacacaatctatagccgttaacacaccaggtatatcagcgtcacccttgcttgcagaattcacaagtgctgatggaagtccggccaatgtaccaactcaagttccagccaaatcaagcgcagcagaaaggcctctggaccgtttgcttaaagcattgcgaacaacacagcgtgagtccctaagtgctgcagtcagcgatattggatctgtcgtgagtatgattgacaggattgctggatcagcgcctggtaatggttctagagctgctgtaggagaagatcttgtcgctatgacaaagtgccgcttgcaagccaggaacttcataactcatgacgggagtggtgcatcaaagaaaatgaagcgggacacgagtgctatgcctcttaatgtgtcatcagctggaagcgtgaatgatagcttgaagcaatcatatggtgttggtactccagagctacaatcaactgcaacctcacgtgtcaagtggcaaagggctgaggtaaaccatgctctgatggaggagattcaggagataaaccaacagcttatagatacagagctccatgtctctgaggatgatgctgagtccttcactacatctgaggggggcaaagggacggtcattagatgcacattcactgctgttgctgtttgccccagcttgaaatccgtgtttgcgtcagcgcagatgagtccaattttgccgttgaggttgcttgttcctgctagctacccgaaatgctccccggtgcttctagacaagtttcctgatgaacaatgcaggaactcagacgacctgtctaccaaggccaagacaaagttcagcgtattgctccggggtctagctgagcccatgtcactgcgagaaatcgcaaggacatgggatgcttgcgctcgcaaagtgatcacagagtatgcccagcaaaccggaggaggcagtttcagctcgagctatggttgctgggaaagctgcgtaggcgcttgttaa

SEQ ID NO: 296 - protein, 1308 aa, Zea mays
MDSAANWRSTQGTDPAAGGVDPNAAAPAGSDWRTQLQPEARHRIVNKIMETLKKHLPVSVPEGLTELHKIAVRFEEKIYTAATSQSDYLRKISLKMLSMESQTKTQQNPGNVQVIPNQNPPGPAPGLPPQVSNPAQSSAIPLISQQQTRQSNASTSVQGSLPSLGQNSSSVSQASTLHNMSVMPQNTMNNGLAQGTPQDMYAAQRQMAGRQQQQQQQQAHNQLIYQQQKYLNQKLQQNSLMPSHIQQQQPLLQSTQMQSSQQPMMQMSSGLQPGQTAIPQTQSMTMHSATQSGIQQNPLNSVQQSVQPLLHQPTQSVVRQQQHPQSMHQQSSLQQTQPTQQPNIPLQQQQPQLMNQQSNLQQNQLMNQQSGVVETQQQQRLPVQSNNLLNMQQTQQMMNQQSMSLHQPQQLANQGNMSSLHQQQHQQNQQQQQLLGTGPNARMHMLQQQKVIQQPQQQQHAQQTSMGLIQPQSQQNQLQQPQQHMMSQFQSQPNQMQQQLGMQQRLQTSAGMLLQQNNIDQKQYVQAQRGLQEAPSTSVDSTAQTGHPGIGDLQEELYQMIKSLKDQYFVELNELYNKVSIKIQQIDNQMPAQKSAEQYEKMKGFKGMLERTLHFLQVNKSNIHPGLREKIPIYERQILSILSSQRRKPVQAPGQQTFQQSSGQAPSSNISQQLQTSQGLQQHDSHTSQMPQASLPSMNTGVQTSGAPAPQGTNFGVPTTQQNVTNAPQAGSNLENAQGNNFNHVQHGSMGAALQQERTGPMQGALNAQQQSSSNMISNNAMSTMQTNNNANANSLQQLKQQRQEHQMMQSQQMKQRQQMMQQIQQKQTLQPQLPIQQLKKQQQQGQMQFPQLHSGNDVNELKVRQGAAIKSGMYQQLSQRNYYQQIKQGGVFPISSPQTLQTSSPQISHHSPQVDQHSLLQSQVKTGTPLHSANSPFVPSPSPPVAPSPMPMDSDKPLSNLSSVTSAGQAGHQQTSLAPQTQSIAVNTPGISASPLLAEFTSADGSPANVPTQVPAKSSAAERPLDRLLKALRTTQRESLSAAVSDIGSVVSMIDRIAGSAPGNGSRAAVGEDLVAMTKCRLQARNFITHDGSGASKKMKRDTSAMPLNVSSAGSVNDSLKQSYGVGTPELQSTATSRVKWQRAEVNHALMEEIQEINQQLIDTELHVSEDDAESFTTSEGGKGTVIRCTFTAVAVCPSLKSVFASAQMSPILPLRLLVPASYPKCSPVLLDKFPDEQCRNSDDLSTKAKTKFSVLLRGLAEPMSLREIARTWDACARKVITEYAQQTGGGSFSSSYGCWESCVGAC

SEQ ID NO: 297 - DNA, 747 bp, Arabidopsis thaliana
atggcgacgaccttaagcagagatcaatatgtctacatggcgaagctcgccgagcaagccgagcgttacgaagagatggttcaattcatggaacagctcgtaagtggagctacaccggccggtgagctgaccgtagaagagaggaatcttctctcggtcgcgtataagaacgtgattggatctcttcgtgcggcatggagaatcgtgtcttcgattgagcaaaaggaagagagcaggaagaacgaagaacacgtgtcgcttgttaaggattacagatctaaagttgagactgagctttcttcgatctgttctgggattctcaggttacttgattcgcatctaattccttcagctactgccagtgagtctaaggttttttacctgaagatgaaaggagattatcatcgttatttggctgagtttaaatctggtgatgagaggaaaactgctgctgaagatactatgatcgcttacaaagctgctcaggacgttgcagttgctgatctagcacctacacatccgatcaggcttggtttggctcttaacttctcagtgttttactacgagattctcaactcttcagagaaagcttgtagcatggcgaaacaggcttttgaagaagccattgctgagctggacacattgggagaggagtcatacaaggacagtactctcatcatgcagttgctaagggacaatctaaccctttggacctccgatatgcaggagcagatggatgaggcctga

SEQ ID NO: 298 - protein, 248 aa, Arabidopsis thaliana
MATTLSRDQYVYMAKLAEQAERYEEMVQFMEQLVSGATPAGELTVEERNLLSVAYKNVIGSLRAAWRIVSSIEQKEESRKNEEHVSLVKDYRSKVETELSSICSGILRLLDSHLIPSATASESKVFYLKMKGDYHRYLAEFKSGDERKTAAEDTMIAYKAAQDVAVADLAPTHPIRLGLALNFSVFYYEILNSSEKACSMAKQAFEEAIAELDTLGEESYKDSTLIMQLLRDNLTLWTSDMQEQMDEA

SEQ ID NO: 299 - DNA, 762 bp, Sorghum bicolor
atgtcgcgggaggagaatgtctacatggccaagctggctgagcaagcagaacggtatgaggaaatggttgagtacatggagaaggtggctaagaccgttgatgtggaagagctcaccgttgaggagcgtaacctcctatctgttgcctacaagaatgtgattggggcccgccgtgcctcatggcggattgtctcctccatcgagcagaaggaggagtcccgcaagaatgaggaacatgttgctcagattaaggagtaccgtggcaagattgaggctgaattgagcaacatttgtgatggtatcctgaagctgcttgactcgcaccttgtgccttcctccactgctgcagagtcgaaggtgttttacctcaagatgaagggtgattatcacaggtaccttgctgagtttaagactggtgctgagaggaaggaatctgcagagagcacaatggtagcttataaggcagcccaggatattgcattggctgaactggcacctactcatcccataaggcttggacttgcacttaacttctcggtgttctattatgagattctgaactctccggacaaagcttgcaaccttgcaaagcaggcatttgatgaggctatttctgagttggacacgcttggtgaggaatcttacaaagatagcaccttgattatgcagctcctaagggacaacttgaccctctggacctctgacatcacggaggagggcactgaggagggcaaagaagcctcgaagggtgatgctgagtag

SEQ ID NO: 300 - protein, 253 aa, Sorghum bicolor
MSREENVYMAKLAEQAERYEEMVEYMEKVAKTVDVEELTVEERNLLSVAYKNVIGARRASWRIVSSIEQKEESRKNEEHVAQIKEYRGKIEAELSNICDGILKLLDSHLVPSSTAAESKVFYLKMKGDYHRYLAEFKTGAERKESAESTMVAYKAAQDIALAELAPTHPIRLGLALNFSVFYYEILNSPDKACNLAKQAFDEAISELDTLGEESYKDSTLIMQLLRDNLTLWTSDITEEGTEEGKEASKGDAE

SEQ ID NO: 301 - DNA, 777 bp, Arabidopsis thaliana
atggcggcgacattaggcagagaccagtatgtgtacatggcgaagctcgccgagcaggcggagcgttacgaagagatggttcaattcatggaacagctcgttacaggcgctactccagcggaagagctcaccgttgaagagaggaatctcctctctgttgcttacaaaaacgtgatcggatctctacgcgccgcctggaggatcgtgtcttcgattgagcagaaggaagagagtaggaagaacgacgagcacgtgtcgcttgtcaaggattacagatctaaagttgagtctgagctttcttctgtttgctctggaatccttaagctccttgactcgcatctgatcccatctgctggagcgagtgagtctaaggtcttttacttgaagatgaaaggtgattatcatcggtacatggctgagtttaagtctggtgatgagaggaaaactgctgctgaagataccatgctcgcttacaaagcagctcaggatatcgcagctgcggatatggcacctactcatccgataaggcttggtctggccctgaatttctcagtgttctactatgagattctcaattcttcagacaaagcttgtaacatggccaaacaggcttttgaggaggccatagctgagcttgacactctgggagaggaatcctacaaagacagcactctcataatgcagttgctgagggacaatttaaccctttggacctccgatatgcaggtattcacatctctttatgccgtacctcgatattctacaccattcgaataa

SEQ ID NO: 302 - protein, 258 aa, Arabidopsis thaliana
MAATLGRDQYVYMAKLAEQAERYEEMVQFMEQLVTGATPAEELTVEERNLLSVAYKNVIGSLRAAWRIVSSIEQKEESRKNDEHVSLVKDYRSKVESELSSVCSGILKLLDSHLIPSAGASESKVFYLKMKGDYHRYMAEFKSGDERKTAAEDTMLAYKAAQDIAAADMAPTHPIRLGLALNFSVFYYEILNSSDKACNMAKQAFEEAIAELDTLGEESYKDSTLIMQLLRDNLTLWTSDMQVFTSLYAVPRYSTPFE

SEQ ID NO: 303 - DNA, 762 bp, Sorghum bicolor; identical to SEQ ID NO: 299

SEQ ID NO: 304 - protein, 253 aa, Sorghum bicolor; identical to SEQ ID NO: 300

SEQ ID NO: 305 - protein, 145 aa, Sesamum indicum
MAEHYGQQQQTRAPHLQLQPRAQRVVKAATAVTAGGSLLVLSGLTLAGTVIALTIATPLLVIFSPVLVPAVITIFLLGAGFLASGGFGVAALSVLSWIYRYLTGKHPPGADQLESAKTKLASKAREMKDRAEQFSQQPVAGSQTS

SEQ ID NO: 306 - protein, 153 aa, Ficus pumila
MAEPQSLQRGERGEQLQLQLQQQQHPRSHQVVKAATAVTAGGSLLVLSALILAGTVIALTIATPLFVIFSPVLVPAVITLGLIIIGFLASGGFGVAALTVLSWIYRYVTGKHPPGADQLDQARHKLASKAREMKDKAEQFGQQHLTSGQQQSS

SEQ ID NO: 307 - protein, 142 aa, Cucumis sativus
MAEHQPYQQSHQQPGSQPRYQVVKAATAATAGGSLLVLSGLILAGTVIALTIATPLLVIFSPVLVPAVITVSLLIMGFLASGGFGVAGITVFSWIYRYVTGKHPPGADQLDLARHKLASKAREMKDRAEQFGQQHTSGPQTS

SEQ ID NO: 308 - protein, 155 aa, Linum usitatissimum
MDQSHQTYAGTMQNPSYGGGGTMHQQQQPRSYQAVKAATAATAGGSLIVLSGLILTATVISLILATPLLVIFSPVLVPALITVGLLITGFLASGGFGVAAVTVLSWIYRYVTGGHPVGADSLEQARSRLAGKAREVKDRASEFGQQHVTGGQQTS

SEQ ID NO: 309 - protein, 212 aa, Glycine max
MGFACKPCMKSLPTRAKPPPQVLPPKPPLTNFSIYTLITTTLNPTTLITHSSLKTLVFHFDNSHTMAELHYQQQHQYPHRYPNDPYEQQTSYSTQVVKAATAVTAGGSLLILASLILAGTIIALTIVTPPLVIFSPVLVPAVITVALLSLGFLASGGFGVAAITVLAWIYRYVTGKYPPGADQLDSAPHKIMDKAREIKDYGQQQISGVQAS

SEQ ID NO: 310 - protein, 149 aa, Ananas comosus
MADYQREQRGGGFMQGQQSQQQQQQQQPMMMTAVKAATAATAGGSMLVLSGLTLAGTVIALTVATPLLVIFSPVLVPATIAVSLLAAGFVTSGGLGLAALSVLSWMYKYLTGKHPPGADQLEHAKARLASKARDIKESAQHRIDQAQGS

SEQ ID NO: 311 - protein, 154 aa, Setaria italica
MADQHRGAMGGGGGGYGDLHRGGERGETQQRQSAMMTALKAATAATAGGSMLVLSGLILAGTVIALTVATPVLVIFSPVLVPAAITLALMAAGFVTSGGLGVAALSVFSWMYKYLTGKHPPGADQLDHAKARLASKARDIKDAAQHRIDQAQGS

SEQ ID NO: 312 - protein, 157 aa, Fragaria vesca
MAELHQQYQQSHPFQAQQGMMQQQPKSYQVAKAATAVTAGGSLLVLSGLVLAGTVICLTVATPLLVIFSPVLVPAVITVALIMTGFLASGGFGVAAISVLSWIYKYVTGSHPPGADKLDSARHKLAGKARDMKDRAEQFGQQHMGTERGQHGQHQTS

SEQ ID NO: 313 - protein, 170 aa, Brassica napus
MTDTARTHHDVTNRDQYSMMGRDRDQYNMYGRDYSKSRQIAKAVTAVTAGGSLLVLSSLTLVGTVIALTVATPLLVIFSPILVPALITVAMLITGFLSSGGFGIAAITVFSWIYKYATGEHPQGSDKLDSARMKLGSKAQDLKDRAQYYGQQHTGGEHDRDRTRGTQHTT

SEQ ID NO: 314 - protein, 147 aa, Solanum lycopersicum
MADYYGQPQHTQHQFFHGGQQPRSHQMVKAATAVTAGGSLLLLSGLTLAATVIALTIATPVLVIFSPVIVPAVITLFLLFSGFLASGGFGVAAVSVLSWIYRYVTGKRPPGADQLEQARHKLATKAGEMKDKAQEFGQQHITGTHQT

1. A transgenic plant, or part thereof, comprising
a) a first exogenous polynucleotide which encodes a transcription factor polypeptide that increases the expression of one or more glycolytic and/or fatty acid biosynthetic genes in the plant or part thereof,
b) a second exogenous polynucleotide which encodes a polypeptide involved in the biosynthesis of one or more non-polar lipids,
c) an increased triacylglycerol (TAG) content in the part or at least a part of the transgenic plant relative to a corresponding wild-type plant or part thereof, and one or more or all of the following phenotypes;
d) an increased soluble protein content in the part or at least a part of the transgenic plant relative to a corresponding wild-type plant or part thereof,
e) an increased nitrogen content in the part or at least a part of the transgenic plant relative to a corresponding wild-type plant or part thereof,
f) decreased carbon:nitrogen ratio in the part or at least a part of the transgenic plant relative to a corresponding wild-type plant or part thereof,
g) increased photosynthetic gene expression in the part or at least a part of the transgenic plant relative to a corresponding wild-type plant or part thereof,
h) increased photosynthetic capacity in the part or at least a part of the transgenic plant relative to a corresponding wild-type plant or part thereof,
i) decreased total dietary fibre (TDF) content in the part or at least a part of the transgenic plant relative to a corresponding wild-type plant or part thereof,
j) increased carbon content in the part or at least a part of the transgenic plant relative to a corresponding wild-type plant or part thereof, and
k) increased energy content in the part or at least a part of the transgenic plant relative to a corresponding wild-type plant or part thereof,
wherein each exogenous polynucleotide is operably linked to a promoter which is capable of directing expression of the polynucleotide in the plant, or part thereof.

2. The plant or part thereof of claim 1 which is derived from an ancestor transgenic plant which comprises the first and second exogenous polynucleotides, wherein the ancestor transgenic plant was selected from a plurality of candidate transgenic plants each comprising the first and second exogenous polynucleotides on the basis that the ancestor transgenic plant comprised one or more or all of the following phenotypes;
a) an increased soluble protein content in at least a part of the transgenic plant relative to a corresponding wild-type plant or part thereof,
b) an increased nitrogen content in at least a part of the transgenic plant relative to a corresponding wild-type plant or part thereof,
c) decreased carbon:nitrogen ratio in at least a part of the transgenic plant relative to a corresponding wild-type plant or part thereof,
d) increased photosynthetic gene expression in at least a part of the transgenic plant relative to a corresponding wild-type plant or part thereof,
e) increased photosynthetic capacity in at least a part of the transgenic plant relative to a corresponding wild-type plant or part thereof,
f) decreased total dietary fibre (TDF) content in at least a part of the transgenic plant relative to a corresponding wild-type plant or part thereof,
g) increased carbon content in at least a part of the transgenic plant relative to a corresponding wild-type plant or part thereof, and
h) increased energy content in at least a part of the transgenic plant relative to a corresponding wild-type plant or part thereof.

3. A transgenic plant, or part thereof, comprising
a) a first exogenous polynucleotide which encodes a transcription factor polypeptide that increases the expression of one or more glycolytic and/or fatty acid biosynthetic genes in the plant or a part thereof,
b) a second exogenous polynucleotide which encodes a polypeptide involved in the biosynthesis of one or more non-polar lipids,
c) an increased triacylglycerol (TAG) content in the part or at least a part of the transgenic plant relative to a corresponding wild-type plant or part thereof,
wherein each exogenous polynucleotide is operably linked to a promoter which is capable of directing expression of the polynucleotide in the plant, or part thereof, and wherein the transgenic plant is derived from an ancestor transgenic plant which comprises the first and second exogenous polynucleotides, wherein the ancestor transgenic plant was selected from a plurality of candidate transgenic plants each comprising the first and second exogenous polynucleotides on the basis that the ancestor transgenic plant comprised one or more or all of the following phenotypes;
i) an increased soluble protein content in at least a part of the transgenic plant relative to a corresponding wild-type plant or part thereof,
ii) an increased nitrogen content in at least a part of the transgenic plant relative to a corresponding wild-type plant or part thereof,
iii) decreased carbon:nitrogen ratio in at least a part of the transgenic plant relative to a corresponding wild-type plant or part thereof,
iv) increased photosynthetic gene expression in at least a part of the transgenic plant relative to a corresponding wild-type plant or part thereof,
v) increased photosynthetic capacity in at least a part of the transgenic, plant relative to a corresponding wild-type plant or part thereof,
vi) decreased total dietary fibre (TDF) content in at least a part of the transgenic plant relative to a corresponding wild-type plant or part thereof,
vii) increased carbon content in at least a part of the transgenic plant relative to a corresponding wild-type plant or part thereof, and
viii) increased energy content in at least a part of the transgenic plant relative to a corresponding wild-type plant or part thereof.

4. The plant, or part thereof, according to any one of claims 1 to 3, wherein one or more or all of the following features apply;
i) the plant or part thereof has an increased soluble protein content in the part or at least a part of the transgenic plant relative to the corresponding wild-type plant or part thereof of at least about 10%, at least about 25%, at least about 50%, at least about 75%, at least about 100%, between about 10% and about 200%, between about 50% and about 150%, or between about 50% and about 125%,
ii) the plant or part thereof has an increased nitrogen content in the part or at least a part of the transgenic plant relative to the corresponding wild-type plant or part thereof of at least about 10%, at least about 25%, at least about 50%, at least about 75%, at least about 100%, between about 10% and about 200%, between about 50% and about 150% or between about 50% and about 125%,
iii) the part is a leaf which has an increased soluble protein content relative to a corresponding wild-type leaf of at least about 10%, at least about 25%, at least about 50%, at least about 75%, at least about 100%, between about 10% and about 200%, between about 50% and about 150%, or between about 50% and about 125%,
iv) the part is a leaf which has an increased nitrogen content relative to a corresponding wild-type leaf of at least about 10%, at least about 25%, at least about 50%, at least about 75%, at least about 100%, between about 10% and about 200%, between about 50% and about 150%, or between about 50% and about 125%,
v) the plant or part thereof has a decreased carbon:nitrogen content in the part or at least a part of the transgenic plant relative to the corresponding wild-type plant or part thereof of at least about 10%, at least about 25%, at least about 40%, between about 10% and about 50%, or between about 25% and about 50%,
vi) expression of one or more genes involved in photosynthesis is increased in the plant or part thereof relative to the corresponding wild-type plant or part thereof,
vii) the plant or part thereof has an increased carbon content in the part or at least a part of the transgenic plant relative to the corresponding wild-type plant or part thereof of at least about 10%, at least about 25%, at least about 50%, at least about 75%, at least about 100%, at least about 125%, at least about 150%, between about 10% and about 300%, between about 50% and about 250%, or between about 100% and about 200%,
viii) the plant or part thereof has an increased energy content in the part or at least a part of the transgenic plant relative to the corresponding wild-type plant or part thereof of at least about 10%, at least about 30%, at least about 50%, at least about 75%, at least about 100%, at least about 125%, at least about 150%, at least about 200%, at least about 250%, between about 10% and about 400%, between about 50% and about 300%, or between about 200% and about 300%,
ix) the plant or part thereof has an decreased starch content in the part or at least a part of the transgenic plant relative to the corresponding wild-type plant or part thereof of at least about 2 fold, at least about 5 fold, at least about 10 fold, at least about 15 fold, at least about 20 fold, at least about 25 fold, between about 5 fold and about 35 fold, between about 10 fold and about 30 fold, or between about 20 fold and about 30 fold,
x) the plant or part thereof has an decreased TDF content in the part or at least a part of the transgenic plant relative to the corresponding wild-type plant or part thereof of at least about 10%, at least about 30%, at least about 50%, between about 10% and about 70%, or between about 30% and about 65%, and
xi) the plant or part thereof has a soluble sugar content in the part or at least a part of the transgenic plant relative to the corresponding wild-type plant or part thereof which is about 0.5 fold to 2 fold.

5. The transgenic plant, or part thereof, according to any one of claims 1 to 4 which further comprises one or more or all of;
a) a first genetic modification which down-regulates endogenous production and/or activity of a polypeptide involved in the catabolism of triacylglycerols (TAG) in the plant, or part thereof, when compared to a corresponding plant, or part thereof, lacking the genetic modification,
b) a third exogenous polynucleotide which encodes a polypeptide which increases the export of fatty acids out of plastids of the plant when compared to a corresponding plant lacking the third exogenous polynucleotide,
c) a fourth exogenous polynucleotide which encodes a second transcription factor polypeptide that increases the expression of one or more glycolytic and/or fatty acid biosynthetic genes in the plant, or part thereof,
d) a fifth exogenous polynucleotide which encodes an oil body coating (OBC) polypeptide,
e) a second genetic modification which down-regulates endogenous production and/or activity of a polypeptide involved in importing fatty acids into plastids of the plant when compared to a corresponding plant lacking the second genetic modification, and
f) a third genetic modification which down-regulates endogenous production and/or activity of a polypeptide involved in diacylglycerol (DAG) production in the plastid when compared to a corresponding plant lacking the third genetic modification, wherein each exogenous polynucleotide is operably linked to a promoter which is capable of directing expression of the polynucleotide in the plant, or part thereof.

6. The plant, or part thereof, of claim 5, wherein each genetic modification is, independently, a mutation of an endogenous gene which partially or completely inactivates the gene, such as a point mutation, an insertion, or a deletion, or an exogenous polynucleotide encoding an RNA molecule which inhibits expression of the endogenous gene, wherein the exogenous polynucleotide is operably linked to a promoter which is capable of directing expression of the polynucleotide in the plant, or part thereof.

7. The plant, or part thereof, according to any one of claims 1 to 6, wherein one or more of the following features apply;
i) the transcription factor polypeptide is selected from the group consisting of Wrinkled 1 (WRI1), Leafy Cotyledon 1 (LEC1), LEC1-like, Leafy Cotyledon 2 (LEC2), BABY BOOM (BBM), FUS3, ABI3, ABI4, ABI5, Dof4 and Dof11, or the group consisting of MYB73, bZIP53, AGL15, MYB115, MYB118, TANMEI, WUS, GFR2a1, GFR2a2 and PHR1,
ii) the polypeptide involved in the biosynthesis of one or more non-polar lipids is a fatty acyl acyltransferase is involved in the biosynthesis of TAG, DAG or monoacylglycerol (MAG) in the plant or part thereof, such as a DGAT, PDAT, LPAAT, GPAT or MGAT, preferably a DGAT or a PDAT,
iii) the polypeptide involved in the catabolism of triacylglycerols (TAG) in the plant, or part thereof, is an SDP1 lipase, a Cgi58 polypeptide, an acyl-CoA oxidase such as ACX1 or ACX2, or a polypeptide involved in β-oxidation of fatty acids in the plant or part thereof such as a PXA1 peroxisomal ATP-binding cassette transporter, preferably an SDP1 lipase,
iv) the oil body coating (OBC) polypeptide is oleosin, such as a polyoleosin or a caleosin, or a lipid droplet associated protein (LDAP),
v) the polypeptide which increases the export of fatty acids out of plastids of the plant or part thereof is a C16 or C18 fatty acid thioesterase such as a FATA polypeptide or a FATB polypeptide, a fatty acid transporter such as an ABCA9 polypeptide or a long-chain acyl-CoA synthetase (LACS),
vi) the polypeptide involved in importing fatty acids into plastids of the plant or part thereof is a fatty acid transporter, or subunit thereof, preferably a TGD polypeptide, and
vii) the polypeptide involved in diacylglycerol (DAG) production in the plastid is a plastidial GPAT, a plastidial LPAAT or a plastidial PAP.

8. The plant, or part thereof, according to any one of claims 1 to 7, wherein the part is a vegetative part and one or more or all of the promoters are expressed at a higher level in the vegetative part relative to seed of the plant.

9. The plant, or part thereof, according to any one of claims 1 to 8, wherein one or more or all of the following features apply;
i) the plant, or a part thereof, comprises a total non-polar lipid content of at least about 8%, at least about 10%, at least about 11%, at least about 12%, at least about 15%, at least about 20%, at least about 25%, at least about 30%, at least about 35%, at least about 40%, at least about 45%, at least about 50%, at least about 55%, at least about 60%, at least about 65%, at least about 70%, between 8% and 75%, between 10% and 75%, between 11% and 75%, between about 15% and 75%, between about 20% and 75%, between about 30% and 75%, between about 40% and 75%, between about 50% and 75%, between about 60% and 75%, or between about 25% and 50% (w/w dry weight),
ii) a vegetative part of a plant comprises a TAG content of at least about 8%, at least about 10%, at least about 11%, at least about 12%, at least about 15%, at least about 20%, at least about 25%, at least about 30%, at least about 35%, at least about 40%, at least about 45%, at least about 50%, at least about 55%, at least about 60%, at least about 65%, at least about 70%, between 8% and 75%, between 10% and 75%, between 11% and 75%, between about 15% and 75%, between about 20% and 75%, between about 30% and 75%, between about 40% and 75%, between about 50% and 75%, between about 60% and 75%, or between about 25% and 50% (w/w dry weight),
iii) one or more or all of the promoters are selected from a tissue-specific promoter such as a leaf and/or stem specific promoter, a developmentally regulated promoter such as a senescence-specific promoter such as a SAG12 promoter, an inducible promoter, or a circadian-rhythm regulated promoter,
iv) the plant, or part thereof, is one member of a population or collection of at least about 1,500, at least about 3,000 or at least about 5,000 such plants, or parts thereof, preferably vegetative plant parts, wherein the first and second exogenous polynucleotides are inserted at the same chromosomal location in the genome of each of the plants,
v) the plant is a member of the family Fabaceae (or Leguminosae) such as alfalfa, clover, peas, lucerne, beans, lentils, lupins, mesquite, carob, soybeans, and peanuts, or a member of the family Poaceae such as corn or sorghum, and
vi) the part is a leaf or leaves which are mature.

10. The plant, or part thereof, according to any one of claims 1 to 9 which is
i) a 16:3 plant or a vegetative part or seed thereof, and which comprises one or more or all of the following:
a) an exogenous polynucleotide which encodes a polypeptide which increases the export of fatty acids out of plastids of the plant when compared to a corresponding plant lacking the exogenous polynucleotide,
b) a first genetic modification which down-regulates endogenous production and/or activity of a polypeptide involved in importing fatty acids into plastids of the plant when compared to a corresponding plant lacking the first genetic modification, and
c) a second genetic modification which down-regulates endogenous production and/or activity of a polypeptide involved in diacylglycerol (DAG) production in the plastid when compared to a corresponding plant lacking the second genetic modification,
wherein the exogenous polynucleotide is operably linked to a promoter which is capable of directing expression of the polynucleotide in the plant, or part thereof, or
ii) a 18:3 plant or a vegetative part or seed thereof.

11. A population of at least about 1,500 plants, each being a plant according to any one of claims 1 to 10, growing in a field.

12. The population of claim 11, wherein the first and second exogenous polynucleotides are inserted at the same chromosomal location in the genome of each of the plants, preferably in the nuclear genome of each of the plants.

13. A collection of at least about 1,500 vegetative plant parts, each being a vegetative plant part according to any one of claims 1 to 10, wherein the vegetative plant parts have been harvested from plants growing in a field.

14. The collection of claim 13, wherein the first and second exogenous polynucleotides are inserted at the same chromosomal location in the genome of each of the vegetative plant parts, preferably in the nuclear genome of each of the vegetative plant parts.

15. A storage bin comprising a collection of vegetative plant parts of claim 13 or claim 14.

16. Seed of, or obtained from, a plant according to any one of claims 1 to 10, preferably a collection of at least 1,500 seeds.

17. An extract of a plant or a part thereof according to any one of claims 1 to 10.

18. The extract of claim 17, wherein one or more of the following features apply;
i) the extract comprises the first and second exogenous polynucleotides,
ii) the extract is lacking at least 50% or at least 90% of the non-polar lipids of the plant or part thereof,
iii) the extract comprises the soluble protein content of the plant or part thereof,
iv) the extract comprises the nitrogen content of the plant or part thereof,
v) the extract is lacking at least 50% or at least 90% of the chlorophyll and/or soluble sugars of the plant or part thereof,
vi) the extract comprises the carbon content of the plant or part thereof, and
vii) the extract comprises a dye which binds protein in the extract.

19. A process for selecting a plant or a part thereof with a desired phenotype, the process comprising
i) obtaining a plurality of candidate plants, or parts thereof, which each comprise
a) a first exogenous polynucleotide which encodes a transcription factor polypeptide that increases the expression of one or more glycolytic and/or fatty acid biosynthetic genes in a plant or part thereof, and
b) a second exogenous polynucleotide which encodes a polypeptide involved in the biosynthesis of one or more non-polar lipids,
wherein each exogenous polynucleotide is operably linked to a promoter which is capable of directing expression of the polynucleotide in the plant, or part thereof,
ii) analysing lipid in the plurality of parts, or at least a part of each plant in the plurality of candidate plants, from step i),
iii) analysing the plurality of parts, or at least a part of each plant in the plurality of candidate plants, from step i) for one or more or all of;
a) soluble protein content,
b) nitrogen content,
c) carbon:nitrogen ratio,
d) photosynthetic gene expression,
e) photosynthetic capacity,
f) total dietary fibre (TDF) content,
g) carbon content, and
h) energy content, and
iv) selecting a plant or part thereof which comprises an increased triacylglycerol (TAG) content in the part or at least a part of the plant relative to a corresponding wild-type plant or part thereof and a desired phenotype selected from one or more or all of the following;
A) an increased soluble protein content in the part or at least a part of the plant relative to a corresponding wild-type plant or part thereof,
B) an increased nitrogen content in the part or at least a part of the plant relative to a corresponding wild-type plant or part thereof,
C) decreased carbon:nitrogen ratio in the part or at least a part of the plant relative to a corresponding wild-type plant or part thereof,
D) increased photosynthetic gene expression in the part or at least a part of the plant relative to a corresponding wild-type plant or part thereof,
E) increased photosynthetic capacity in the part or at least a part of the plant relative to a corresponding wild-type plant or part thereof,
F) decreased total dietary fibre (TDF) content in the part or at least a part of the plant relative to a corresponding wild-type plant or part thereof,
G) increased carbon content in the part or at least a part of the plant relative to a corresponding wild-type plant or part thereof, and
H) increased energy content in the part or at least a part of the plant relative to a corresponding wild-type plant or part thereof.

20. A method of producing a plant which has integrated into its genome a set of exogenous polynucleotides and/or genetic modifications as defined in any one of claims 1 to 10, the method comprising the steps of
i) crossing two parental plants, wherein one plant comprises at least one of the exogenous polynucleotides and/or at least one genetic modifications as defined in any one of claims 1 to 10, and the other plant comprises at least one of the exogenous polynucleotides and/or at least one genetic modifications as defined in any one of claims 1 to 10, and wherein between them the two parental plants comprise a set of exogenous polynucleotides and/or genetic modifications as defined in any one of claims 1 to 10,
ii) screening one or more progeny plants from the cross for the presence or absence of the set of exogenous polynucleotides and/or genetic modifications as defined in any one of claims 1 to 10, and
iii) selecting a progeny plant which comprise the set of exogenous polynucleotides and/or genetic modifications as defined in any one of claims 1 to 10 and which has a desired trait determined using the process of claim 19, thereby producing the plant.

21. A process for producing a feedstuff, the process comprising admixing a transgenic plant or part thereof of any one of claims 1 to 10, seed of claim 16, or an extract of claim 17 or claim 18, with at least one other food ingredient.

22. A feedstuff comprising a transgenic plant or part thereof of any one of claims 1 to 10, seed of claim 16, or an extract of claim 17 or claim 18.

23. The feedstuff of claim 22 which is silage, pellets or hay.

24. A process for feeding an animal, the process comprising providing to the animal a transgenic plant or part thereof of any one of claims 1 to 10, seed of claim 16, an extract of claim 17 or claim 18, or a feedstuff of claim 22 or claim 23.

25. The process of claim 24, wherein the animal ingests an increased amount of nitrogen, protein, carbon and/or energy potential relative to when the animal ingests the same amount on a dry weight basis of a corresponding wild-type plant or part thereof, seed or extract or feedstuff produced from the corresponding wild-type plant or part thereof.

26. A process for producing an industrial product, the process comprising the steps of:
i) obtaining a transgenic plant or part thereof of any one of claims 1 to 10, or seed of claim 16, and
ii) either
a) converting at least some of the lipid in the plant or part thereof, or seed of step i) to the industrial product by applying heat, chemical, or enzymatic means, or any combination thereof, to the lipid in situ in the plant or part thereof, or seed, or
b) physically processing the plant or part thereof, or seed of step i), and subsequently or simultaneously converting at least some of the lipid in the processed plant or part thereof, or seed to the industrial product by applying heat, chemical, or enzymatic means, or any combination thereof, to the lipid in the processed plant or part thereof, or seed, and
iii) recovering the industrial product,
thereby producing the industrial product.

27. A process for producing extracted lipid, the process comprising the steps of:
i) obtaining a transgenic plant or part thereof of any one of claims 1 to 10, or seed of claim 16,
ii) extracting lipid from the plant or part thereof, or seed, and
iii) recovering the extracted lipid,
thereby producing the extracted lipid.

28. A process for producing seed, the process comprising:
i) growing a plant according to any one of claims 1 to 10, and
ii) harvesting seed from the plant.

29. Recovered or extracted lipid or soluble protein obtainable from a transgenic plant or part thereof of any one of claims 1 to 10, or seed of claim 16, or obtainable by the process of claim 27.

30. An industrial product produced by the process of claim 26, which is a hydrocarbon product such as fatty acid esters, preferably fatty acid methyl esters and/or a fatty acid ethyl esters, an alkane such as methane, ethane or a longer-chain alkane, a mixture of longer chain alkanes, an alkene, a biofuel, carbon monoxide and/or hydrogen gas, a bioalcohol such as ethanol, propanol, or butanol, biochar, or a combination of carbon monoxide, hydrogen and biochar.

31. Use of a transgenic plant or part thereof of any one of claims 1 to 10, seed of claim 16, extract of claim 17 or claim 18 or the recovered or extracted lipid or soluble protein of claim 30 for the manufacture of an industrial product.

32. A process for producing fuel, the process comprising:
i) reacting the lipid of claim 29 with an alcohol, optionally, in the presence of a catalyst, to produce alkyl esters, and
ii) optionally, blending the alkyl esters with petroleum based fuel.

33. A process for producing a synthetic diesel fuel, the process comprising:
i) converting the lipid in a transgenic plant or part thereof of any one of claims 1 to 10, or seed of claim 16 to a bio-oil by a process comprising pyrolysis or hydrothermal processing or to a syngas by gasification, and
ii) converting the bio-oil to synthetic diesel fuel by a process comprising fractionation, preferably selecting hydrocarbon compounds which condense between about 150° C. to about 200° C. or between about 200° C. to about 300° C., or converting the syngas to a biofuel using a metal catalyst or a microbial catalyst.

34. A process for producing a biofuel, the process comprising converting the lipid in a transgenic plant or part thereof of any one of claims 1 to 10, or seed of claim 16 to bio-oil by pyrolysis, a bioalcohol by fermentation, or a biogas by gasification or anaerobic digestion.

35. A method of producing a plant extract, the method comprising
i) obtaining a transgenic plant or part thereof of any one of claims 1 to 10, or seed of claim 16,
ii) processing the transgenic plant or part thereof, or seed, to produce the extract.

36. The method of claim 35, wherein step ii) comprising producing two or more fractions from the transgenic plant or part thereof, or seed, and selecting at least one, but not all of the fractions.

37. The method of claim 36, wherein the selected fraction(s) has one or more of the following features;
i) comprises the first and second exogenous polynucleotides,
ii) is lacking at least 50% or at least 90% of the non-polar lipids of the plant or part thereof,
iii) comprises the soluble protein content of the plant or part thereof,
iv) comprises the nitrogen content of the plant or part thereof,
v) is lacking at least 50% or at least 90% of the chlorophyll and/or soluble sugars of the plant or part thereof, and
vi) comprises the carbon content of the plant or part thereof.
